(19) United States
(12) Patent Application Publication
(10) Pub. No.: US 2003/0165924 A1
(43) Pub. Date: Sep. 4, 2003

(54) Genes expressed in foam cell differentiation

(76) Inventors: Dov Shiffman, Palo Alto, CA (US); Roland Somogyi, Sydenham Ontario (CA); Richard Lawn, San Francisco, CA (US); Jeffrey J. Seilhamer, Los Altos Hills, CA (US); J. Gordon Porter, Newark, CA (US); Thomas Mikita, San Francisco, CA (US); Julie Tai, Cupertino, CA (US)

Correspondence Address: Incyte Genopmics Inc, Legal Department, 3160 Porter Drive, Palo Alto, CA, 94304, US

(21) Appl. No.: 10/240,965

(22) PCT Filed: Apr. 4, 2001
(86) PCT No.: PCT/US01/11128

(30) Foreign Application Priority Data
Apr. 5, 2000 (US) 60195106

(51) Int. Cl. C12Q 1/68; G01N 33/53; C07H 21/04; C07K 14/00

(52) U.S. Cl. 435/6; 435/7.1; 536/23.2; 530/350

(57) ABSTRACT

The present invention relates to purified polynucleotides and compositions comprising pluralities of polynucleotides that are differentially expressed during foam cell development and are associated with atherosclerosis. The present invention presents the use of the compositions as elements on a substrate, and provides methods for using the compositions and polynucleotides.

### TECHNICAL FIELD

[0001] The present invention relates to a plurality of polynucleotides which may be used in detecting genes modulated in human foam cells. In particular, the present invention provides for the use of these polynucleotides in the diagnosis of conditions, disorders, and diseases associated with atherosclerosis.

### BACKGROUND OF THE INVENTION

[0002] Atherosclerosis and the associated coronary artery disease and cerebral stroke represent the most common cause of death in industrialized nations. Although certain key risk factors have been identified, a full molecular characterization that elucidates the causes and provide care for this complex disease has not been achieved. Molecular characterization of growth and regression of atherosclerotic vascular lesions requires identification of the genes that contribute to features of the lesion including growth, stability, dissolution, rupture and, most lethally, induction of occlusive vessel thrombus.

[0003] An early step in the development of atherosclerosis is formation of the “fatty streak”. Lipoproteins, such as the cholesterol-rich low-density lipoprotein (LDL), accumulate in the extracellular space of the vascular intima, and undergo modification. Oxidation of LDL occurs most avidly in the sub-endothelial space where circulating antioxidant defenses are less effective. The degree of LDL oxidation affects its interaction with target cells. “Minimally oxidized” LDL (MM-LDL) is able to bind to LDL receptor but not to the oxidized LDL (Ox-LDL) or “scavenger” receptors that have been identified, including scavenger receptor types A and B, CD36, CD68/macrosialin and LOX-1 (Navab et al. (1994) Arterioscler Thromb Vasc Biol 16:831-842; Kodama et al. (1990) Nature 343:531-535; Acton et al. (1994) J Biol Chem 269:21003-21009; Endemann et al. (1993) J Biol Chem 268:11811-11816; Ramprasad et al. (1996) Proc Natl Acad Sci 92:14833-14838; Kataoka et al. (1999) Circulation 99:3110-3117). MM-LDL can increase the adherence and penetration of monocytes, stimulate the release of monocyte chemotactic protein 1 (MCP-1) by endothelial cells, and induce scavenger receptor A (SRA) and CD36 expression in macrophages (Cushing et al. (1990) Proc Natl Acad Sci 87:5134-5138; Yoshida et al. (1998) Arterioscler Thromb Vasc Biol 18:794-802; Steinberg (1997) J Biol Chem 272:20963-20966). SRA and the other scavenger receptors can bind Ox-LDL and enhance uptake of lipoprotein particles.

[0004] Mononuclear phagocytes enter the intima, differentiate into macrophages, and ingest modified bpids including Ox-LDL. In most cell types, cholesterol content is tightly controlled by feedback regulation of LDL receptors and biosynthetic enzymes (Brown and Goldstein (1986) Science 232:34-47). In imacrophages, however, the additional scavenger receptors lead to unregulated uptake of cholesterol (Brown and Goldstein (1983) Annu Rev Biochem 52:223-261) and accumulation of multiple intracellular lipid droplets producing “foam cell” phenotype. Cholesterol-engorged and dead macrophages contribute most of the mass of early “fatty streak” plaques and typical “advanced” lesions of diseased arteries. Numerous studies have described a variety of foam cell responses that contribute to growth and rupture of atherosclerotic vessel wall plaques. These responses include production of multiple growth factors and cytokie, which promote proliferation and adherence of neighboring cells; chemokines, which further attract circulating monocytes into the growing plaque; proteins, which cause remodeling of the extracellular matrix; and tissue factor, which can trigger thrombosis (Ross (1993) Nature 362:801-809; Quin et al. (1987) Proc Natl Acad Sci 84:2995-2998). Thus, cholesterol-loaded macrophages which occur in abundance in most stages of the atherosclerotic plaque formation contribute to inception of the atheroscerotic process and to eventual plaque rupture and occlusive thrombus.

[0005] During Ox-LDL uptake, macrophages produce cytokines and growth factors that elicit further cellular events that modulate atherogenesis such as smooth muscle cell proliferation and production of extracellular matrix. Additionally, these macrophages may activate genes involved in inflammation including inducible nitric oxide synthase. Thus, genes differentially expressed during foam cell formation may reasonably be expected to be markers of the atherosclerotic process.

[0006] The present invention provides a method of high-throughput screening using a plurality of probes and purified polynucleotides in a diagnostic context as markers of atherosclerosis and other cardiovascular disorders.

### SUMMARY OF THE INVENTION

[0007] The present invention provides a composition comprising a plurality of polynucleotides differentially expressed in foam cell development selected from SEQ ID NOs:1-276 as presented in the Sequence Listing. In one embodiment, each polynucleotide is an early marker of foam cell formation and is either unregulated, SEQ ID NOs:1-55, or downregulated, SEQ ID NOs:171-196. In a second embodiment, each polynucleotide is differentially expressed greater than 3-fold and is either upregulated, SEQ ID NOs:47-67, or downregulated, SEQ ID NOs:194-213. Further, the invention encompasses complements of the polynucleotides and immobilization of the polynucleotides on a substrate.

[0008] The invention provides a high throughput method for detecting altered expression of one or more polynucleotides in a sample. The method comprises hybridizing the polynucleotide composition with the sample, thereby forming one or more hybridization complexes; detecting the hybridization complexes; and comparing the hybridization complexes with those of a standard, wherein each difference in the size and intensity of a hybridization complex indicates altered expression of a polynucleotide in the sample. The sample can be from a subject with atherosclerosis and comparison with a standard defines early, mid, and late stages of that disease.

[0009] The invention also provides a high throughput method of screening a library of molecules or compounds to identify a ligand. The method comprises combining the polynucleotide composition with a library of molecules or compounds under conditions to allow specific binding; and detecting specific binding, thereby identifying a ligand. Libraries of molecules or compounds are selected from DNA molecules, RNA molecules, peptide nucleic acids (PNAs), mimetics, peptides, and proteins. The invention additionally provides a method for purifying a ligand, the method comprising combining a polynucleotide of the invention with a sample under conditions which allow specific binding, recovering the bound polynucleotide, and separating the polynucleotide from the ligand, thereby obtaining purified ligand.

[0010] The invention also provides a method of obtaining an extended or full length gene from a library of expressed or genomic nucleic acid sequences. The method comprises arranging individual library sequences on a substrate; hybridizing a polynucleotide selected from the Sequence Listing with the library sequences under conditions which allow specific binding; detecting hybridization between the polynucleotide and a sequence; and isolating the library sequence, thereby obtaining the extended or full length gene.

[0011] The present invention further provides a substantially purified polynucleotide selected from SEQ ID NOs:35-48, 68-80, 192,193, 214-224 as presented in the Sequence Listing. The invention also provides an expression vector containing the polynucleotide, a host cell containing the expression vector, and a method for producing a protein comprising culturing the host cell under conditions for the expression of protein and recovering the protein from the host cell culture.

[0012] The present invention further provides a protein encoded by a polynucleotide of the invention. The invention also provides a high-throughput method for screening a library of molecules or compounds to identify at least one ligand which specifically binds the protein. The method comprises combining the protein or a portion thereof with the library of molecules or compounds under conditions to allow specific binding and detecting specific binding, thereby identifying a ligand which specifically binds the protein. Libraries of molecules or compounds are selected from DNA molecules, RNA molecules, PNAs, mimetic, peptides, proteins, agonists, antagonists, antibodies or their fragments, immunoglobulins, inhibitors, drug compounds, and pharmaceutical agents. The invention further provides for using a protein to purify a ligand. The method comprises combining the protein or a portion thereof with a sample under conditions to allow specific binding, recovering the bound protein, and separating the protein from the ligand, thereby obtaining purified ligand. The invention also provides a pharmaceutical composition comprising the protein in conjunction with a pharmaceutical carrier and a purified antibody that specifically binds to the protein.

### DESCRIPTION OF THE TABLES

[0013] A portion of the disclosure of this patent document contains material which is subject to copyright protection. The copyright owner has no objection to the facsimilereproduction by anyone of the patent document or the patent disclosure, as it appears in the Patent and Trademark Office patent file or records, but otherwise reserves all copyright rights whatsoever.

[0014] The Sequence Listing is a compilation of polynucleotides obtained by sequencing clone inserts (isolates) of different cDNAs and identified by hybrid complex formation using the cDNAs as probes on a microarray. Each sequence is identified by a sequence identification number (SEQ ID NO) and by an Incyte ID number. The Incyte ID number represents the gene sequence that contains the clone insert.

[0015] Table 1 shows the differentially expressed genes associated with foam cell development identified by cluster analysis. Column 1 shows the SEQ ID NO, column 2 shows the Incyte ID number, and column 3 shows the gene annotation. Columns 4 through 10 show the normalized differential expression, and column 11 shows the cluster to which the gene was assigned.

[0016] FIGS. 1A and 1B show graphs of the average normalized expression pattern over the time points for genes in each cluster. Clusters 1 through 4 contain genes which are up-regulated at days 1, 2, or 4. Clusters 5 and 6 contain genes that are down-regulated at later time points, and cluster 7 contains genes that are up-regulated at 8 hours.

[0017] Table 2 shows an identification map for each sequence. Column 1 shows the SEQ ID NO, and column 2 shows the Incyte ID number. Column 3 shows the Clone number of the Incyte clone represented on the UNIGEM V 2.0 microarray. Columns 4 and 5 show the START and STOP sites for the clone insert sequence relative to the gene sequence identified in column 2 and shown in the Sequence Listing.

[0018] Table 3 is a list of the genes that show differential expression early in foam cell differentiation. Column 1 shows the SEQ ID NO, column 2 shows the Incyte ID number, and column 3 shows the gene annotation. Columns 4 through 10 show the differential expression values for each time point. Columns 11 and 12 show the maximum change in expression up or down, respectively, over the time course. Column 12 shows the maximum difference seen over the time course.

[0019] Table 4 is a list of the genes that show greater than 3-fold differential expression during foam cell differentiation. Column 1 shows the SEQ ID NO, column 2 shows the Incyte ID number, and column 3 shows the gene annotation. Columns 4 through 10 show the differential expression values for each time point. Columns 11 and 12 show the maximum change in expression up or down, respectively, over the time course. Column 12 shows the maximum difference seen over the time course.

### DETAILED DESCRIPTION OF THE INVENTION

[0020] Before the nucleic acid sequences and methods are presented, it is to be understood that this invention is not limited to the particular machines, methods, and materials described. Although particular embodiments are described, machines, methods, and materials similar or equivalent to these embodiments may be used to practice the invention. The preferred machines, methods, and materials set forth are not intended to limit the scope of the invention which is limited only by the appended claims.

[0021] The singular forms “a”, “an”, and “the” include plural reference unless the context clearly dictates otherwise. All technical and scientific terms have the meanings commonly understood by one of ordinary skill in the art. All publications are incorporated by reference for the purpose of describing and disclosing the cell lines, vectors, and methodologies which are presented and which might be used in connection with the invention. Nothing in the specification is to be construed as an admission that the invention is not entitled to antedate such disclosure by virtue of prior invention.

[0022] Definitions

[0023] “Amplification” refers to the production of additional copies of a nucleotide sequence and is carried out using polymerase chain reaction (PCR) technologies well known in the art.

[0024] “Complementary” describes the relationship between two single-stranded nucleotide sequences that anneal by base-pairing (5′-A-G-T-3′ pairs with its complement 3′-T-C-A-5′).

[0025] “E-value” refers to the statistical probability that a match between two sequences occurred by chance.

[0026] “Derivative” refers to a polynucleotide or a polypeptide that has been subjected to a chemical modification. Illustrative of such modifications would be replacement of a hydrogen by, for example, an acetyl, acyl, alkyl, amino, formyl, or morpholino group. Derivative polynucleotides may encode polypeptides that retain the essential biological characteristics (such as catalytic and regulatory domains) of naturally occurring polypeptides.

[0027] “Fragment” refers to at least 18 consecutive nucleotides of a polynucleotide of the Sequence Listing or its complement. A “unique” fragment refers to at least 18 consecutive nucleotides of a particular polynucleotide or its complement that is specific to a polynucleotide of the Sequence Listing and that under hybridization conditions would not detect related polynucleotides in which it does not appear.

[0028] “Homology” refers to sequence similarity between a reference sequence and at least a fragment of a polynucleotide or a portion of a polypeptide.

[0029] “Hybridization complex” refers to a complex between two polynucleotides by virtue of the formation of hydrogen bonds between purines and pyrimidines.

[0030] “Immunological activity” is the capability of the natural, recombinant, or synthetic polypeptide or portion thereof to induce in an animal a specific immune response that results in the production of antibodies.

[0031] “Ligand” refers to any molecule, agent, or compound which will bind specifically to a complementary site on a polynucleotide or protein. Such ligands stabilize or modulate the activity of polynucleotides or proteins of the invention and may be composed of at least one of the following: inorganic and organic substances including nucleic acids, proteins, carbohydrates, fats, and lipids.

[0032] “Microarray” refers to an ordered arrangement of hybridizable elements on a substrate. The elements are arranged so that there are a “plurality” of elements, preferably more than one element, more preferably at least 100 elements, and even more preferably at least 1,000 elements, and most preferably at least 10,000 on a 1 cm² substrate. The maximum number of elements is unlimited, but is at least 100,000 elements. Furthermore, the hybridization signal from each of the elements is individually distinguishable. In the present and preferred embodiment, the elements comprise polynucleotide probes.

[0033] “Modulates” refers to any change in activity (increased or decreased; biological, chemical, or immunological) or lifespan resulting from specific binding between a molecule and a polynucleotide or polypeptide of the invention.

[0034] “Oligonucleotide” or “oligomer” refers to a nucleotide sequence of at least about 15 nucleotides to as many as about 60 nucleotides, preferably about 18 to 30 nucleotides, and most preferably about to 25 nucleotides that are used as a “primer” or “amplimer” in the polymerase chain reaction (PCR) or as an array element.

[0035] “Peptide nucleic acid” (PNA) refers to a DNA mimic in which nucleotide bases are attached to a pseudopeptide backbone to increase stability. PNAs, also designated antigene agents, can prevent gene expression by hybridizing to complementary messenger RNA.

[0036] “Polynucleotide” refers to an oligonucleotide, nucleotide sequence, nucleic acid molecule, DNA molecule, or any fragment or complement thereof. It may be DNA or RNA of genomic or synthetic origin, double-stranded or single-stranded, coding and/or noncoding, an exon or an intron of a genomic DNA molecule, or combined with carbohydrate, lipids, protein or inorganic elements or substances.

[0037] “portion” refers to at least six contiguous amino acids of a polypeptide encoded by a polynucleotide of the Sequence Listing. A portion may represent an amino acid sequence that is conserved among related proteins (e.g., a catalytic domain such as a kinase domain).

[0038] “Post-translational modification” of a polypeptide may involve lipidation, glycosylation, phosphorylation, acetylation, racenlization, proteolytic cleavage, and the like. These processes may occur synthetically or biochemically. Biochemical modifications will vary by cellular location, cell type, pH, enzymatic milieu, and the like.

[0039] “Probe” refers to a polynucleotide or a fragment thereof that hybridizes to a nucleic acid molecule in a sample or on a substrate. A probe is used to detect, amplify, or quantify cDNAs, endogenous genes, or transcript mRNAs by employing conventional, molecular biology techniques. As used herein, probes are the reporter molecule of hybridization reactions including Southern, northern, in situ, dot blot, array, and like technologies.

[0040] “Protein” refers to a protein or any portion thereof including a polypeptide or an oligopeptide. A portion of a polypeptide generally retains biological or immunogenic characteristics of a native protein. An “oligopeptide” is an amino acid sequence of at least about 5 residues, more preferably 10 residues and most preferably about 15 residues that are immunogenic and are used as part of a fusion protein to produce an antibody.

[0041] “Purified” refers to polynucleotides, polypeptides, antibodies, and the like, that are isolated from at least one other component with which they are naturally associated.

[0042] “Sample” is used herein in its broadest sense. A sample containing polynucleotides, polypeptides, antibodies and the like may comprise a bodily fluid; a soluble fraction of a cell preparation, or media in which cells were grown; a chromosome, an organelle, or membrane isolated or extracted from a cell; genomic DNA, RNA, or cDNA in solution or bound to a substrate; a cell; a tissue; a tissue print; a fingerprint, skin or hair; and the like.

[0043] “Specific binding” or “specifically binding” refers to the interaction between two molecules. In the case of a polynucleotide, specific binding may involve hydrogen bonding between sense and antisense strands or between one stand and a protein which affects its replication or transcription, intercalation of a molecule or compound into the major or minor groove of the DNA molecule, or interaction with at least one molecule which functions as a transcription factor, enhancer, repressor, and the like. In the case of a polypeptide, specific binding may involve interactions with polynucleotides, as described above or with molecules or compounds such as agonists, antibodies, antagonists, and the like. Specific binding is dependent upon the presence of structural features that allow appropriate chemical or molecular interactions between molecules.

[0044] “Substrate” refers to any rigid or semi-rigid support to which molecules or compounds are bound and includes membranes, filters, chips, slides, wafers, fibers, magnetic or nonmagnetic beads, gels, capillaries or other tubing, plates, polymers, and microparticles with a variety of surface forms including wells, trenches, pins, channels and pores.

[0045] The Invention

[0046] The present invention provides a composition comprising a plurality of polynucleotides, wherein each polynucleotide is differentially expressed in macrophages as they differentiate into foam cells. The plurality of polynucleotides comprise at least a fragment of the identified sequences, SEQ ID NOs:1-276, as presented in the Sequence Listing. Additionally, the invention provides a subset of polynucleotides whose expression is upregulated, SEQ ID NOs:1-55, or downregulated, SEQ ID NOs:171-196, early in foam cell formation. The invention also provides a subset of polynucleotides whose expression is upregulated, SEQ ID NOs:47-67, or downregulated, SEQ ID NOs:194-213, greater than 3-fold during foam cell formation. The invention also provides novel polynucleotides whose expression is upregulated, SEQ ID NOs:35-48 and 68-80, or downregulated, SEQ ID NOs:192, 193, and 214-222, during foam cell development.

[0047] Method for Selecting Polynucleotides

[0048] Human THP-1 cells (American Type Culture Collection, Manassas Va.) were grown in serum-containing medium and differentiated with 12-0-tetradecanoyl-phorbol-13-acetate (Research Biochemical International, Natick Mass.) for 24 hours. Cells were then cultured either in the presence or absence of Ox-LDL from time points ranging from 30 minutes to 4 days. Poly (A) RNA from cultured cells was prepared for expression profiling after 0, 0.5, 2.5, 8, 24, 48, and 96 hours exposure to Ox-LDL. Poly(A) RNA from experimental and control cells was labeled with separate fluorescent dyes and hybridized in time-matched pairs on UNIGEM V 2.0 arrays (Incyte Pharmaceuticals, Palo Alto Calif.).

[0049] Agglomerative cluster analysis was used to identify response patterns and to establish relationships between different gene expression profiles. Each gene measurement was normalized by dividing the expression ratios by the maximum value for each time series. The clustering process defined a hierarchical tree with the number of branches intersecting at each branch level of the tree equal to the number of clusters at that level. Division of the tree at branch level 5 divided the genes into 7 clusters of gene expression containing 276 differentially expressed genes and splice variants, SEQ ID NOs:1-276.

[0050] Table 1shows the differentially expressed genes and splice variants associated with foam cell development identified by cluster analysis. Column 1 shows the SEQ ID NO, column 2 shows the Incyte ID number, and column 3 shows the gene annotation. Columns 4 through 10 show the normalized differential expression; each gene has a maximum value of 1.0. The background shading indicates the relative expression in response to Ox-LDL; white represents relative expression ranging from 0-25% of maximum for that particular gene; light gray from 26-50%; dark gray from 51-75%; black from 76-100%. Column 11 shows the cluster to which the gene was assigned.

[0051] FIG. 1 shows a graph of the average normalized expression pattern over the time points for all the genes in each cluster. Clusters 1 through 4 contain genes which are up-regulated at days 1, 2, or 4. Clusters 5 and 6 contain genes that are down-regulated at later time points, and cluster 7 contains genes that are up-regulated at 8 hours.

[0052] Table 2 shows an ID map for each SEQ ID NO. Column 1 shows the SEQ ID NO and column 2 shows the Incyte ID number. Column 3 shows the Clone number of the Incyte clone represented on the UNIGEM V 2.0 microarray. Columns 4 and 5 show the START and STOP sites for the clone insert sequence relative to the gene sequence identified in column 2.

[0053] Table 3 is a list of the genes that show differential expression early in foam cell differentiation. Column 1 shows the SEQ ID NO, column 2 shows the Incyte ID number, and column 3 shows the gene annotation. Columns 4 through 10 show the differential expression values for each time point. Values represent treated sample divided by time matched untreated sample. Columns 11 and 12 show the maximum change in expression up or down, respectively, over the time course. Column 12 shows the maximum difference seen over the time course.

[0054] Table 4 is a list of the genes that show greater than 3-fold differential expression during foam cell differentiation. Column 1 shows the SEQ ID NO, column 2. shows the Incyte ID number, and column 3 shows the gene annotation. Columns 4 through 10 show the differential expression values for each time point. Values represent treated sample divided by time matched untreated sample. Columns 11 and 12 show the maximum change in expression up or down, respectively, over the time course. Column 12 shows the maximum difference seen over the time course.

[0055] The polynucleotides of the invention can be genomic DNA, cDNA, mRNA, or any RNA-like or DNA-like material such as peptide nucleic acids, branched DNAs and the like. Polynucleotide probes can be sense or antisense strand. Where targets are double stranded, probes may be either sense or antisense strands. Where targets are single stranded, probes are complementary single strands. In one embodiment, polynucleotides are cDNAs. In another embodiment, polynucleotides are plasmids. In the case of plasmids, the sequence of interest is the cDNA insert.

[0056] Polynucleotides can be prepared by a variety of synthetic or enzymatic methods well known in the art. Polynucleotides can be synthesized, in whole or in part, using chemical methods well known in the art (Caruthers et al. (1980) Nucleic Acids Symp. Ser. (7)215-233). Alternatively, polynucleotides can be produced enzymatically or recombinantly, by in vitro or in vivo transcription.

[0057] Nucleotide analogs can be incorporated into polynucleotide probes by methods well known in the art. The only requirement is that the incorporated nucleotide analogs of the probe must base pair with target nucleotides. For example, certain guanine nucleotides can be substituted with hypoxanthine which base pairs with cytosine residues. However, these base pairs are less stable than those between guanine and cytosine. Alternatively, adenine nucleotides can be substituted with 2,6-diaminopurine which can form stronger base pairs with thymidine than those between adenine and thymidine. Additionally, polynucleotides can include nucleotides that have been derivatized chemically or enzymatically. Typical chemical modifications include derivatization with acyl, alkyl, aryl or amino groups.

[0058] Polynucleotides can be synthesized on a substrate. Synthesis on the surface of a substrate may be accomplished using a chemical coupling procedure and a piezoelectric printing apparatus as described by Baldeschweiler et al. (PCT publication WO95/25 1116). Alternatively, the polynucleotides can be synthesized on a substrate surface using a self-addressable electronic device that controls when reagents are added as described by Heller et al. (U.S. Pat. No. 5,605,662; incorporated herein by reference).

[0059] Complementary DNA (cDNA) can be arranged and then immobilized on a substrate. Polynucleotides can be immobilized by covalent means such as by chemical bonding procedures or UV irradiation. In one such method, a cDNA is bound to a glass surface which has been modified to contain epoxide or aldehyde groups. In another case, a cDNA probe is placed on a polylysine coated surface and then UV cross-linked as described by Shalon et al. (WO95/35505). In yet another method, a DNA is actively transported from a solution to a given position on a substrate by electrical means (Heller et al., supra). Alternatively, polynucleotides, clones, plasmids or cells can be arranged on a filter. In the latter case, cells are lysed, proteins and cellular components degraded, and the DNA is coupled to the filter by UV cross-linking.

[0060] Furthermore, polynucleotides do not have to be directly bound to the substrate, but rather can be bound to the substrate through a linker group. The linker groups are typically about 6 to 50 atoms long to provide exposure of the attached probe. Preferred linker groups include ethylene glycol oligomers, diamines, diacids and the like. Reactive groups on the substrate surface react with a terminal group of the linker to bind the linker to the substrate. The other terminus of the linker is then bound to the polynucleotide.

[0061] Polynucleotides can be attached to a substrate by sequentially dispensing reagents for probe synthesis on the substrate surface or by dispensing preformed DNA fragments to the substrate surface. Typical dispensers include a micropipette delivering solution to the substrate with a robotic system to control the position of the micropipette with respect to the substrate. There can be a multiplicity of dispensers so that reagents can be delivered to the reaction regions efficiently.

[0062] Use of the Polynucleotides

[0063] The polynucleotide of the present invention may be used for a variety of purposes. For example, the composition of the invention may be used as elements on a nucroarray. The microarray can be used in high-throughput methods such as for detecting a related polynucleotide in a sample, screening libraries of molecules or compounds to identify a ligand, or diagnosing a particular cardiovascular condition, disease, or disorder such as atherosclerosis. Alternatively, a polynucleotide complementary to a given sequence of the sequence listing can inhibit or inactivate a therapeutically relevant gene related to the polynucleotide.

[0064] When the composition of the invention is employed as elements on a microarray, the polynucleotide elements are organized in an ordered fashion so that each element is present at a specified location on the substrate. Because the elements are at specified locations on the substrate, the hybridization patterns and intensities, which together create a unique expression profile, can be interpreted in terms of expression levels of particular genes and can be correlated with a particular metabolic process, condition, disorder, disease, stage of disease, or treatment.

[0065] Hybridization

[0066] The polynucleotides or fragments or complements thereof of the present invention may be used in various hybridization technologies. The polynucleotides may be naturally occurring, recombinant, or chemically synthesized; based on genomic or cDNA sequences; and labeled using a variety of reporter molecules by either PCR or enzymatic techniques. Commercial kits are available for labeling and cleanup of such polynucleotides or probes. Radioactive (Amersham Pharmacia Biotech), fluorescent (Operon Technologies, Alameda Calif.), and chemiluminescent labeling (Promega, Madison Wis.), are well known in the art. Alternatively, a polynucleotide is cloned into a commercially available vector, and probes are produced by transcription. The probe is synthesized and labeled by addition of an appropriate polymerase, such as T7 or SP6 polymerase, and at least one labeled nucleotide.

[0067] A probe may be designed or derived from unique regions of the polynucleotide, such as the 3′ untranslated region or from a conserved motif, and used in protocols to identify naturally occurring molecules encoding the same polypeptide, allelic variants, or related molecules. The probe may be DNA or RNA, is usually single stranded and should have at least 50% sequence identity to any of the nucleic acid sequences. The probe may comprise at least 18 contiguous nucleotides of a polynucleotide. Such a probe may be used under hybridization conditions that allow binding only to an identical sequence or under conditions that allow binding to a related sequence with at least one nucleotide substitution or deletion. Discovery of related sequences may also be accomplished using a pool of degenerate probes and appropriate hybridization conditions. Generally, a probe for use in Southern or northern hybridizations may be from about 400 to about 4000 nucleotides long. Such probes may be single-stranded or double-stranded and may have high binding specificity in solution-based or substrate-based hybridizations. A probe may also be an oligonucleotide that is used to detect a polynucleotide of the invention in a sample by PCR.

[0068] The stringency of hybridization is determined by G+C content of the probe, salt concentration, and temperature. In particular, stringency is increased by reducing the concentration of salt or raising the hybridization temperature. In solutions used for some membrane based hybridizations, addition of an organic solvent such as formamide allows the reaction to occur at a lower temperature. Hybridization may be performed with buffers, such as 5×saline sodium citrate (SSC) with 1% sodium dodecyl sulfate (SDS) at 60° C., that permits the formation of a hybridization complex between nucleic acid sequences that contain some mismatches. Subsequent washes are performed with buffers such as 0.2×SSC with 0.1% SDS at either 45° C. (medium stringency) or 65°-68° C. (high stringency). At high stringency, hybridization complexes will remain stable only where the polynucleotides are completely complementary. In some membrane-based hybridizations, preferably 35% or most preferably 50%, formamide may be added to the hybridization solution to reduce the temperature at which hybridization is performed. Background signals may be reduced by the use of detergents such as Sarkosyl or Triton X-100 (Sigma Aldrich, St. Louis Mo.) and a blocking agent such as denatured salmon sperm DNA. Selection of components and conditions for hybridization are well known to those skilled in the art and are reviewed in Ausubel (supra, pp. 6.11-6.19, 14.11-14.36, and A1-43).

[0069] Dot-blot, slot-blot, low density and high density arrays are prepared and analyzed using methods known in the art. Probes or array elements from about 18 consecutive nucleotides to about 5000 consecutive nucleotides are contemplated by the invention and used in array technologies. The preferred number of probes or array elements is at least about 40,000; a more preferred number is at least about 18,000; an even more preferred number is at least about 10,000; and a most preferred number is at least about 600 to about 800. The array may be used to monitor the expression level of large numbers of genes simultaneously and to identify genetic variants, mutations, and SNPs. Such information may be used to determine gene function; to understand the genetic basis of a disorder; to diagnose a disorder; and to develop and monitor the activities of therapeutic agents being used to control or cure a disorder. (See, e.g., U.S. Pat. No. 5,474,796; PCT application WO95/11995; PCT application WO95/35505; U.S. Pat. Nos. 5,605,662; and 5,958,342.)

[0070] Screening Assays

[0071] A polynucleotide may be used to screen a library or a plurality of molecules or compounds for a ligand with specific binding affinity. The ligands may be DNA molecules, RNA molecules, PNAs, peptides, proteins such as transcription factors, enhancers, repressors, and other proteins that regulate the activity, replication, transcription, or translation of the polynucleotide in the biological system. The assay involves combining the polynucleotide or a fragment thereof with the molecules or compounds under conditions that allow specific binding and detecting the bound polynucleotide to identify at least one ligand that specifically binds the polynucleotide.

[0072] In one embodiment, the polynucleotide of the invention may be incubated with a library of isolated and purified molecules or compounds and binding activity determined by methods well known in the art, e.g., a gel-retardation assay (U.S. Pat. No. 6,010,849) or a reticulocyte lysate transcriptional assay. In another embodiment, the polynucleotide may be incubated with nuclear extracts from biopsied and/or cultured cells and tissues. Specific binding between the polynucleotide and a molecule or compound in the nuclear extract is initially determined by gel shift assay and may be later confirmed by raising antibodies against that molecule or compound. When these antibodies are added into the assay, they cause a supershift in the gel-retardation assay.

[0073] In another embodiment, the polynucleotide may be used to purify a molecule or compound using affinity chromatography methods well known in the art. In one embodiment, the polynucleotide is chemically reacted with cyanogen bromide groups on a polymeric resin or gel. Then a sample is passed over and reacts with or binds to the polynucleotide. The molecule or compound which is bound to the polynucleotide may be released from the polynucleotide by increasing the salt concentration of the flow-through medium and collected.

[0074] Purification of Ligand

[0075] The polynucleotide or a fragment thereof may be used to purify a ligand from a sample. A method for using a mammalian polynucleotide or a fragment thereof to purify a ligand would involve combining the polynucleotide or a fragment thereof with a sample under conditions to allow specific binding, recovering the bound polynucleotide, and using an appropriate agent to separate the polynucleotide from the purified ligand.

[0076] Protein Production and Uses

[0077] The polynucleotides of this application or their full length cDNAs may be used to produce purified polypeptides using recombinant DNA technologies described herein and taught in Ausubel (supra; pp. 16.1-16.62). One of the advantages of producing polypeptides by these procedures is the ability to obtain highly-enriched sources of the polypeptides thereby simplifying purification procedures. The present invention also encompasses amino acid substitutions, deletions or insertions made on the basis of similarity in polarity, charge, solubility, hydrophobicity, hydrophilicity, and/or the amphipathic nature of the residues involved. Such substitutions may be conservative in nature when the substituted residue has structural or chemical properties similar to the original residue (e.g., replacement of leucine with isoleucine or valine) or they may be nonconservative when the replacement residue is radically different (e.g., a glycine replaced by a tryptophan). Computer programs included in LASERGENE software (DNASTAR, Madison Wis.), MACVECTOR software (Genetics Computer Group, Madison Wis.) and RasMol software (www.umass.edu/microbio/rasmol) may be used to help determine which and how many amino acid residues in a particular portion of the polypeptide may be substituted, inserted, or deleted without abolishing biological or immunological activity.

[0078] Expression of Encoded Proteins

[0079] Expression of a particular cDNA may be accomplished by cloning the cDNA into an appropriate vector and transforming this vector into an appropriate host cell. The cloning vector used for the construction of the human and rat cDNA libraries may also be used for expression. Such vectors usually contain a promoter and a polylinker useful for cloning, priming, and transcription. An exemplary vector may also contain the promoter for β-galactosidase, an amino-terminal methionine and the subsequent seven amino acid residues of β-galactosidase. The vector may be transformed into an appropriate host strain of E. coli. Induction of the isolated bacterial strain with isopropyltliogalactoside (IPTG) using standard methods will produce a fusion protein that contains an N terminal metbionine, the first seven residues of β-galactosidase, about 15 residues of linker, and the polypeptide encoded by the cDNA.

[0080] The cDNA may be shuttled into other vectors known to be useful for expression of protein in specific hosts. Oligonucleotides containing cloning sites and fragments of DNA sufficient to hybridize to stretches at both ends of the cDNA may be chemically synthesized by standard methods. These primers may then be used to amplify the desired fragments by PCR. The fragments may be digested with appropriate restriction enzymes under standard conditions and isolated using gel electrophoresis. Alternatively, similar fragments are produced by digestion of the cDNA with appropriate restriction enzymes and filled in with chemically synthesized oligonucleotides. Fragments of the coding sequence from more than one gene may be ligated together and expressed.

[0081] Signal sequences that dictate secretion of soluble proteins are particularly desirable as component parts of a recombinant sequence. For example, a chimeric protein may be expressed that includes one or more additional purification-facilitating domains. Such domains include, but are not limited to, metal-chelating domains that allow purification on immobilized metals, protein A domains that allow purification on immobilized inumunoglobulin, and the domain utilized in the FLAGS extension/affinity purification system (Immunex, Seattle Wash.). The inclusion of a cleavable-linker sequence such as ENTEROKINASEMAX (Invitrogen, San Diego Calif.) between the polypeptide and the purification domain may also be used to recover the polypeptide.

[0082] Suitable expression hosts may include, but are not limited to, mammalian cells such as Chinese Hamster Ovary (CHO) and human 293 cells, insect cells such as Sf9 cells, yeast cells such as Saccharomyces cerevisiae, and bacteria such as E, coli. For each of these cell systems, a useful expression vector may also include an origin of replication and one or two selectable markers to allow selection in bacteria as well as in a transfected eukaryotic host. Vectors for use in eukaryotic expression hosts may require the addition of 3′ poly(A) tail if the polynucleotide lacks poly(A).

[0083] Additionally, the vector may contain promoters or enhancers that increase gene expression. Most promoters are host specific, and they include MMTV, SV40 or metallothionein promoters for CHO cells; trp, lac, tac or T7 promoters for bacterial hosts; or alpha factor, alcohol oxidase or PGH promoters for yeast. Adenoviral vectors with enhancers such as the rous sarcoma virus (RSV) enhancer or retroviral vectors with promoters such as the long terminal repeat (LTR) promoter may be used to drive protein expression in mammalian cell lines. Once homogeneous cultures of recombinant cells are obtained, large quantities of a secreted soluble polypeptide may be recovered from the conditioned medium and analyzed using chromatographic methods well known in the art. An alternative method for the production of large amounts of secreted protein involves the transformation of mammalian embryos and the recovery of the recombinant protein from milk produced by transgenic cows, goats, sheep, and the like.

[0084] In addition to recombinant production, polypeptides or portions thereof may be produced using solid-phase techniques (Stewart et al. (1969) Solid-Phase Peptide Synthesis, W H Freeman, San Francisco Calif.; Merrifield (1963) J Am Chem Soc 5:2149-2154), manually, or using machines such as the ABI 431A Peptide synthesizer (PE Biosystems, Norwalk Conn.). Polypeptides produced by any of the above methods may be used as pharmaceutical compositions to treat disorders associated with underexpression.

[0085] Screening Assays

[0086] A protein or a portion thereof encoded by the polynucleotide may be used to screen libraries or a plurality of molecules or compounds for a ligand with specific binding affinity or to purify a molecule or compound from a sample. The polypeptide or portion thereof employed in such screening may be free in solution, affixed to an abiotic or biotic substrate, or located intracellularly. For example, viable or fixed prokaryotic host cells that are stably transformed with recombinant nucleic acids that have expressed and positioned a polypeptide on their cell surface can be used in screening assays. The cells are screened against libraries or a plurality of ligands and the specificity of binding or formation of complexes between the expressed polypeptide and the ligand may be measured. The ligands may be DNA, RNA, or PNA molecules, agonists, antagonists, antibodies, immunoglobulin, inhibitors, peptides, pharmaceutical agents, proteins, drugs, or any other test molecule or compound that specifically binds the polypeptide. An exemplary assay involves combining the mammalian polypeptide or a portion thereof with the molecules or compounds under conditions that allow specific binding and detecting the bound polypeptide to identify at least one ligand that specifically binds the polypeptide.

[0087] This invention also contemplates the use of competitive drug screening assays in which neutralizing antibodies capable of binding the polypeptide specifically compete with a test compound capable of binding to the polypeptide or oligopeptide or fragment thereof. One method for high throughput screening using very small assay volumes and very small amounts of test compound is described in U.S. Pat. No. 5,876,946. Molecules or compounds identified by screening may be used in a mammalian model system to evaluate their toxicity, diagnostic, or therapeutic potential.

[0088] Purification of a Ligand

[0089] The polypeptide or a portion thereof may be used to purify a ligand from a sample. A method for using a mammalian polypeptide or a portion thereof to purify a ligand would involve combining the polypeptide or a portion thereof with a sample under conditions to allow specific binding, recovering the bound polypeptide, and using an appropriate chaotropic agent to separate the polypeptide from the purified ligand.

[0090] Production of Antibodies

[0091] A polypeptide encoded by a polynucleotide of the invention may be used to produce specific antibodies. Antibodies may be produced using an oligopeptide or a portion of the polypeptide with inherent immunological activity. Methods for producing antibodies include: 1) injecting an animal (usually goats, rabbits, or mice) with the polypeptide, or a portion or an oligopeptide thereof, to induce an immune response; 2) engineering hybridomas to produce monoclonal antibodies; 3) inducing in vivo production in the lymphocyte population; or 4) screening libraries of recombinant immunoglobulins. Recombinant immunoglobunns may be produced as taught in U.S. Pat. No. 4,816,567.

[0092] Antibodies produced using the polypeptides of the invention are useful for the diagnosis of prepathologic disorders as well as the diagnosis of chronic or acute diseases characterized by abnormalities in the expression, amount, or distribution of the polypeptide. A variety of protocols for competitive binding or immunoradiometric assays using either polyclonal or monoclonal antibodies specific for polypeptides are well known in the art. immunoassays typically involve the formation of complexes between a polypeptide and its specific binding molecule or compound and the measurement of complex formation. A two-site, monoclonal-based immunoassay utilizing monoclonal antibodies reactive to two noninterfering epitopes on a specific polypeptide is preferred, but a competitive binding assay may also be employed

[0093] Immunoassay procedures may be used to quantify expression of the polypeptide in cell cultures, in subjects with a particular disorder or in model animal systems under various conditions. Increased or decreased production of polypeptides as monitored by immunoassay may contribute to knowledge of the cellular activities associated with developmental pathways, engineered conditions or diseases, or treatment efficacy. The quantity of a given polypeptide in a given tissue may be determined by performing immunoassays on freeze-thawed detergent extracts of biological samples and comparing the slope of the binding curves to binding curves generated by purified polypeptide.

[0094] Labeling of Molecules for Assay

[0095] A wide variety of reporter molecules and conjugation techniques are known by those skilled in the art and may be used in various polynucleotide, polypeptide or antibody arrays or assays. Synthesis of labeled molecules may be achieved using Promega or Amersham Pharmacia Biotech kits for incorporation of a labeled nucleotide such as ³²p-dCTP, Cy3-dCTP or Cy5-dCTP or amino acid such as ³⁵S-methionine. Polynucleotides, polypeptides, or antibodies may be directly labeled with a reporter molecule by chemical conjugation to amines, thiols and other groups present in the molecules using reagents such as BIODIPY or FITC (Molecular Probes, Eugene Oreg.).

[0096] The polypeptides and antibodies may be labeled for purposes of assay by joining them, either covalently or noncovalently, with a reporter molecule that provides for a detectable signal. A wide variety of labels and conjugation techniques are known and have been reported in the scientific and patent literature including, but not limited to U.S. Pat. Nos. 3,817,837; 3,850,752; 3,939,350; 3,996,345; 4,277,437; 4,275,149; and 4,366,241.

[0097] Diagnostics

[0098] The polynucleotides, or fragments thereof, may be used to detect and quantify altered gene expression; absence, presence, or excess expression of mRNAs; or to monitor mRNA levels during therapeutic intervention. Conditions, diseases or disorders associated with altered expression include atherosclerosis and associated complications. These polynucleotides can also be utilized as markers of treatment efficacy against the diseases noted above and other cardiovascular disorders, conditions, and diseases over a period ranging from several days to months. The diagnostic assay may use hybridization or amplification technology to compare gene expression in a biological sample from a patient to standard samples in order to detect altered gene expression. Qualitative or quantitative methods for this comparison are well known in the art.

[0099] For example, the polynucleotide may be labeled by standard methods and added to a biological sample from a patient under conditions for the formation of hybridization complexes. After an incubation period, the sample is washed and the amount of label (or signal) associated with hybridization complexes, is quantified and compared with a standard value. If the amount of label in the patient sample is significantly altered in comparison to the standard value, then the presence of the associated condition, disease or disorder is indicated.

[0100] In order to provide a basis for the diagnosis of a condition, disease or disorder associated with gene expression, a normal or standard expression profile is established This may be accomplished by combining a biological sample taken from normal subjects, either animal or human, with a probe under conditions for hybridization or amplification Standard hybridization may be quantified by comparing the values obtained using normal subjects with values from an experiment in which a known amount of a substantially purified target sequence is used. Standard values obtained in this manner may be compared with values obtained from samples from patients who are symptomatic for a particular condition, disease, or disorder. Deviation from standard values toward those associated with a particular condition is used to diagnose that condition.

[0101] Such assays may also be used to evaluate the efficacy of a particular therapeutic treatment regimen in animal studies and in clinical trial or to monitor the treatment of an individual patient. Once the presence of a condition is established and a treatment protocol is initiated, diagnostic assays may be repeated on a regular basis to determine if the level of expression in the patient begins to approximate that which is observed in a normal subject. The results obtained from successive assays may be used to show the efficacy of treatment over a period ranging from several days to months.

[0102] Gene Expression Profiles

[0103] A gene expression profile comprises a plurality of polynucleotides and a plurality of detectable hybridization complexes, wherein each complex is formed by hybridization of one or more probes to one or more complementary sequences in a sample. The polynucleotide composition of the invention is used as elements on a microarray to analyze gene expression profiles. In one embodiment, the microarray is used to monitor the progression of disease. Researchers can assess and catalog the differences in gene expression between healthy and diseased tissues or cells. By analyzing changes in patterns of gene expression, disease can be diagnosed at earlier stages before the patient is symptomatic. The invention can be used to formulate a prognosis and to design a treatment regimen. The invention can also be used to monitor the efficacy of treatment. For treatments with known side effects, the microarray is employed to improve the treatment regimen. A dosage is established that causes a change in genetic expression patterns indicative of successful treatment. Expression patterns associated with the onset of undesirable side effects are avoided. This approach may be more sensitive and rapid than waiting for the patient to show inadequate improvement, or to manifest side effects, before altering the course of treatment.

[0104] In another embodiment, animal models which mimic a human disease can be used to characterize expression profiles associated with a particular condition, disorder or disease or treatment of the condition, disorder or disease. Novel treatment regimens may be tested in these animal models using microarrays to establish and then follow expression profiles over time. In addition, microarrays may be used with cell cultures or tissues removed from animal models to rapidly screen large numbers of candidate drug molecules, looking for ones that produce an expression profile similar to those of known therapeutic drugs, with the expectation that molecules with the same expression profile will likely have similar therapeutic effects. Thus, the invention provides the means to rapidly determine the molecular mode of action of a drug.

[0105] Assays Using Antibodies

[0106] Antibodies directed against epitopes on a protein encoded by a polynucleotide of the invention may be used in assays to quantify the amount of protein found in a particular human cell. Such assays include methods utilizing the antibody and a label to detect expression level under normal or disease conditions. The antibodies may be used with or without modification, and labeled by joining them, either covalently or noncovalently, with a labeling moiety.

[0107] Protocols for detecting and measuring protein expression using either polyclonal or monoclonal antibodies are well known in the art. Examples include ELISA, RIA, and fluorescent activated cell sorting (FACS). Such immunoassays typically involve the formation of complexes between the protein and its specific antibody and the measurement of such complexes. These and other assays are described in Pound (supra). The method may employ a two-site, monoclonal-based immunoassay utilizing monoclonal antibodies reactive to two non-interfering epitopes, or a competitive binding assay. (See, e.g., Coligan et al. (1997) Current Protocols in Immunology, Wiley-Interscience, New York N.Y.; Pound, supra)

[0108] Therapeutics

[0109] The polynucleotides of the present invention and fragments thereof can be used in gene therapy. Polynucleotides of the invention can be delivered to a target tissue, such as mononuclear phagocytes. Expression of the protein encoded by the polynucleotide may correct a disease state associated with reduction or loss of endogenous target protein. Polynucleotides may be delivered to specific cells in vitro. Transformed cells are transferred in vivo to various tissues. Alternatively, polynucleotides may be delivered in vivo. Polynucleotides are delivered to cells or tissues using vectors such as retrovirus, adenovirus, adeno-associated virus, herpes simplex virus, and bacterial plasmids. Non-viral methods of gene delivery include cationic liposomes, polylysine conjugates, artifical viral envelopes, and direct injection of DNA (Anderson (1998) Nature 392:25-30; Dachs et al. (1997) Oncol Res 9:313-325; Chu et al. (1998) J Mol Med 76(3-4):184-192; August et al. (1997) Gene Theraov (Advances in Pharmacolog Vol. 40), Academic Press, San Diego Calif.).

[0110] In addition, expression of a particular protein can be modulated through the specific binding of an antisense polynucleotide sequence to a nucleic acid sequence which either encodes the protein or directs its expression. The antisense polynucleotide can be DNA, RNA, or nucleic acid mimics and analogs. The nucleic acid sequence can be cellular niRNA and/or genomic DNA and binding of the antisense sequence can affect translation and/or transcription, respectively. Antisense sequences can be delivered intracellularly using viral vectors or non-viral vectors as described above (Weiss et al. (1999) Cell Mol Life Sci 55(3):334-358; Agrawal (1996) Antisense Therapeutics, Humana Press Inc., Totowa N.J.).

[0111] Both polynucleotides and antisense sequences can be produced ex vivo by using any of the ABI nucleic acid synthesizers or other automated systems known in the art. Polynucleotides and antisense sequences can also be produced biologically by transforming an appropriate host cell with an expression vector containing the sequence of interest.

[0112] Molecules which modulate the expression of a polynucleotide of the invention or activity of the encoded protein are useful as therapeutics for conditions and disorders associated with an immune response. Such molecules include agonists which increase the expression or activity of the polynucleotide or encoded protein, respectively; or antagonists which decrease expression or activity of the polynucleotide or encoded protein, respectively. In one aspect, an antibody which specifically binds the protein may be used directly as an antagonist or indirectly as a targeting or delivery mechanism for bringing a pharmaceutical agent to cells or tissues which express the protein.

[0113] Additionally, any of the proteins or their ligands, or complementary nucleic acid sequences may be administered in combination with other appropriate therapeutic agents. Selection of the appropriate agents for use in combination therapy may be made by one of ordinary skill in the art, according to conventional pharmaceutical principles. The combination of therapeutic agents may act synergistically to affect the treatment or prevention of the conditions and disorders associated with an immune response. Using this approach, one may be able to achieve therapeutic efficacy with lower dosages of each agent, thus reducing the potential for adverse side effects. Further, the therapeutic agents may be combined with pharmaceutically-acceptable carriers including excipients and auxiliaries which facilitate processing of the active compounds into preparations which can be used pharmaceutically. Further details on techniques for formulation and administration may be found in the latest edition of Remington's Pharmaceutical Sciences (Maack Publishing Co., Easton Pa.).

[0114] Model Systems

[0115] Animal models may be used as bioassays where they exhibit a phenotypic response similar to that of humans and where exposure conditions are relevant to human exposures. Mannmals are the most common models, and most infectious agent, cancer, drug, and toxicity studies are performed on rodents such as rats or mice because of low cost, availability, lifespan, reproductive potential, and abundant reference literature. Inbred and outbred rodent strains provide a convenient model for investigation of the physiological consequences of underexpression or overexpression of genes of interest and for the development of methods for diagnosis and treatment of diseases. A mammal inbred to overexpress a particular gene (for example, secreted in milk) may also serve as a convenient source of the protein expressed by that gene.

[0116] Transgenic Animal Models

[0117] Transgenic rodents that overexpress or underexpress a gene of interest may be inbred and used to model human diseases or to test therapeutic or toxic agents. (See, e.g., U.S. Pat. Nos. 5,175,383 and 5,767,337.) In some cases, the introduced gene may be activated at a specific time in a specific tissue type during fetal or postnatal development. Expression of the transgene is monitored by analysis of phenotype, of tissue-specific mRNA expression, or of serum and tissue protein levels in transgenic animals before, during, and after challenge with experimental drug therapies.

[0118] Embryonic Stem Cells

[0119] Embryonic (ES) stem cells isolated from rodent embryos retain the potential to form embryonic tissues. When ES cells are placed inside a carrier embryo, they resume normal development and contribute to tissues of the live-born animal. ES cells are the preferred cells used in the creation of experimental knockout and knockin rodent strains. Mouse ES cells, such as the mouse 129/SvJ cell line, are derived from the early mouse embryo and are grown under culture conditions well known in the art. Vectors used to produce a transgenic strain contain a disease gene candidate and a marker gene, the latter serves to identify the presence of the introduced disease gene. The vector is transformed into ES cells by methods well known in the art, and transformed ES cells are identified and microinjected into mouse cell blastocysts such as those from the C57BL/6 mouse strain. The blastocysts are surgically transferred to pseudopregnant dams, and the resulting chimeric progeny are genotyped and bred to produce heterozygous or homozygous strains.

[0120] ES cells derived from human blastocysts may be manipulated in vitro to differentiate into at least eight separate cell lineages. These lineages are used to study the differentiation of various cell types and tissues in vitro, and they include endoderm, mesoderm, and ectodermal cell types that differentiate into, for example, neural cells, hematopoietic lineages, and cardiomyocytes.

[0121] Knockout Analysis

[0122] In gene knockout analysis, a region of a gene is enzymatically modified to include a non-natural intervening sequence such as the neomycin phosphotransferase gene (neo; Capecchi (1989) Science 244:1288-1292). The modified gene is transformed into cultured ES cells and integrates into the endogenous genome by homologous recombination. The inserted sequence disrupts transcription and translation of the endogenous gene. Transformed cells are injected into rodent blastulae, and the blastulae are implanted into pseudopregnant dams. Transgenic progeny are crossbred to obtain homozygous inbred lines that lack a functional copy of the mammalian gene.

[0123] Knockin Analysis

[0124] ES cells can be used to create knockin humanized animals (pigs) or transgenic animal models (mice or rats) of human diseases. With knockin technology, a region of a human gene is injected into animal ES cells, and the human sequence integrates into the animal cell genome. Transformed cells are injected into blastulae and the blastulae are implanted as described above. Transgenic progeny or inbred lines are studied and treated with potential pharmaceutical agents to obtain information on treatment of the analogous human condition These methods have been used to model several human diseases.

[0125] As described herein, the uses of the polynucleotides, provided in the Sequence Listing of this application, and their encoded polypeptides are exemplary of known techniques and are not intended to reflect any limitation on their use in any technique that would be known to the person of average skill in the art. Furthermore, the polynucleotides provided in this application may be used in molecular biology techniques that have not yet been developed, provided the new techniques rely on properties of nucleotide sequences that are currently known to the person of ordinary skill in the art, e.g., the triplet genetic code, specific base pair interactions, and the like. Likewise, reference to a method may include combining more than one method for obtaining or assembling full length cDNA sequences that will be known to those skilled in the art.

[0126] It is to be understood that the invention is not limited to the particular methodology, protocols, and reagents described, as these may vary. It is also understood that the terminology used herein is for the purpose of describing particular embodiments only, and is not intended to limit the scope of the present invention which will be limited only by the appended claims. The examples below are provided to illustrate the subject invention and are not included for the purpose of limiting the invention.

### EXAMPLES

[0127] I. Construction of cDNA Libraries

[0128] RNA was purchased from Clontech Laboratories, Inc. (Palo Alto Calif.) or isolated from various tissues. Some tissues were homogenized and lysed in guanidinium isothiocyanate, while others were homogenized and lysed in phenol or in a suitable mixture of denaturants, such as TRIZOL reagent (Life Technologies, Rockville Md.). The resulting lysates were centrifuged over CsCl cushions or extracted with chloroform. RNA was precipitated with either isopropanol or ethanol and sodium acetate, or by other routine methods.

[0129] Phenol extraction and precipitation of RNA were repeated as necessary to increase RNA purity. In most cases, RNA was treated with DNase. For most libraries, poly(A) RNA was isolated using oligo d(T)-coupled paramagnetic particles (Promega), OLIGOTEX latex particles (Qiagen, Valencia Calif.), or an OLIGOTEX mRNA purification kit (Qiagen). Alternatively, poly(A) RNA was isolated directly from tissue lysates using other kits, including the POLY(A)PURE mRNA purification kit (Ambion, Austin Tex.).

[0130] In some cases, Stratagene (La Jolla, Calif.) was provided with RNA and constructed the corresponding cDNA libraries. Otherwise, cDNA was synthesized and cDNA libraries were constructed with the UNIZAP vector system (Stratagene) or SUPERSCRIPT plasrid system (Life Technologies) using the recommended procedures or similar methods known in the art (See Ausubel, supra, Units 5.1 through 6.6.) Reverse transcription was initiated using oligo d(T) or random primers. Synthetic oligonucleotide adapters were ligated to double stranded cDNA, and the cDNA was digested with the appropriate restriction enzyme or enzymes. For most libraries, the cDNA was size-selected (300-1000 bp) using SEPHACRYL S1000, SEPHAROSE CL2B, or SEPHAROSE CL4B column chromatography (Amersham Pharmacia Biotech, Piscataway N.J.) or preparative agarose gel electrophoresis. cDNAs were ligated into compatible restriction enzyme sites of the polylinker of the PBLUESCRIPT plasmid (Stratagene), PSPORT1 plasmid (Life Technologies), or PINCY plasmid (Incyte Pharmaceuticals). Recombinant plasmids were transformed into XL1-Blue, XL1-BlueMRF, or SOLR competent E. coli cells (Stratagene) or DH5α, DH10B, or ELECTROMAX DH10B competent E, coli cells (Life Technologies).

[0131] In some cases, libraries were superinfected with a 5× excess of the helper phage, M13K07, according to the method of Vieira et al. (1987, Methods Enzymol. 153:3-11) and normalized or subtracted using a methodology adapted from Soares (1994, Proc Natl Acad Sci 91:9228-9232), Swaroop et al. (1991, Nucl Acids Res 19:1954), and Bonaldo et al. (1996, Genome Research 6:791-806). The modified Soares normalization procedure was utilized to reduce the repetitive cloning of highly expressed high abundance cDNAs while maintaining the overall sequence complexity of the library. Modification included significantly longer hybridization times which allowed for increased gene discovery rates by biasing the normalized libraries toward those infrequently expressed low-abundance cDNAs which are poorly represented in a standard transcript image (Soares et al., supra).

[0132] II. Isolation and Sequencing of cDNA Clones

[0133] Plasmids were recovered from host cells by in vivo excision using the UNIZAP vector system (Stratagene) or by cell lysis. Plasmids were purified using one of the following: the Magic or WIZARD Minipreps DNA purification system (Promega); the AGTC Miniprep purification kit Edge BioSystems, Gaithersburg Md.); the QIAWELL 8, QIAWELL 8 Plus, or QIAWELL 8 Ultra plasmid purification systems, or the R.E.A.L. PREP 96 plasmid purification kit (QIAGEN). Following precipitation, plasmids were resuspended in 0.1 ml of distilled water and stored, with or without lyophilization, at 4° C.

[0134] Alternatively, plasmid DNA was amplified from host cell lysates using direct link PCR in a high-throughput format (Rao (1994) Anal Biochem 216:1-14). Host cell lysis and thermal cycling steps were carried out in a singlereaction mixture. Samples wereprocessed and stored in 384-well plates, and the concentration of amplified plasmid DNA was quantified fluorometrically using PICOGREEN dye (Molecular Probes) and a FLUOROSKAN II fluorescence scanner (absystems Oy, Helsinki, Finland).

[0135] cDNA sequencing reactions were processed using standard methods or high-throughput instrumentation such as the ABI CATALYST 800 thermal cycler (PE Biosystems) or the DNA ENGINE thermal cycler (MJ Research, Watertown Mass.) in conjunction with the HYDRA microdispenser (Robbins Scientific, Sunnyvale Calif.) or the MICROLAB 2200 system (Hamilton, Reno Nev.). cDNA sequencing reactions were prepared using reagents provided by Amersham Pharmacia Biotech or supplied in ABI sequencing kits such as the ABI PRISM BIGDYE cycle sequencing kit (PE Biosystems). Electrophoretic separation of cDNA sequencing reactions and detection of labeled polynucleotides were carried out using the MEGABACE 1000 DNA sequencing system (Amersham Pharmacia Biotech); the ABI PRISM 373 or 377 sequencing system (PE Biosystems) in conjunction with standard ABI protocols and base calling software; or other sequence analysis systems known in the art. Reading frames within the cDNA sequences were identified using standard methods (reviewed in Ausubel, supra, Unit 7.7).

[0136] III. Extension of cDNA Sequences

[0137] Nucleic acid sequences were extended using Incyte cDNA clones and oligonucleotide primers. One primer was synthesized to initiate 5′ extension of the known fragment, and the other, to initiate 3′ extension of the known fragment. The initial primers were designed using OLIGO 4.06 software (National Biosciences), or another appropriate program, to be about 22 to 30 nucleotides in length, to have a GC content of about 50% or more, and to anneal to the target sequence at temperatures of about 68° C. to about 72° C. Any stretch of nucleotides which would result in hairpin structures and primer-primer dimerizations was avoided

[0138] Selected human cDNA libraries were used to extend the sequence. If more than one extension was necessary or desired, additional or nested sets of primers were designed. Preferred libraries are ones that have been size-selected to include larger cDNAs. Also, random primed libraries are preferred because they will contain more sequences with the 5′ and upstream regions of genes. A randomly primed library is particularly useful if an oligo d(T) library does not yield a full-length cDNA.

[0139] High fidelity amplification was obtained by PCR using methods well known in the art. PCR was performed in 96-well plates using the DNA ENGINE thermal cycler (MJ Research). The reaction mix contained DNA template, 200 nmol of each primer, reaction buffer containing Mg⁺², (NH₄)2SO₄, and β-mercaptoethanol, Taq DNA polymerase (Amersham Pharmacia Biotech), ELONGASE enzyme (Life Technologies), and Pfu DNA polymerase (Stratagene), with the following parameters for primer pair PCI A and PCI B (Incyte Pharmaceuticals): Step 1: 94° C., 3 min; Step 2: 94° C., 15 sec; Step 3: 60° C., 1 min; Step 4: 68° C., 2 min; Step 5: Steps 2, 3, and 4 repeated 20 times; Step 6: 68° C., 5 min; Step 7: storage at 4° C.. In the alternative, the parameters for primer pair T7 and SK+ (Stratagene) were as follows: Step 1: 94° C., 3 min; Step 2: 94° C., 15 sec; Step 3: 57° C., 1 min; Step 4: 68° C., 2 min; Step 5: Steps 2, 3, and 4 repeated 20 times; Step 6: 68° C., 5 mm; Step 7: storage at 4° C.

[0140] The concentration of DNA in each well was determined by dispensing 100 μl PICOGREEN reagent (0.25% reagent in 1×TE, v/v; Molecular Probes) and 0.5 of undiluted PCR product into each well of an opaque fluorimeter plate (Corning Costar, Acton Mass.) and allowing the DNA to bind to the reagent. The plate was scanned in a Fluoroskan II (Labsystems Oy) to measure the fluorescence of the sample and to quantify the concentration of DNA. A 5 μl to 10 μl aliquot of the reaction mixture was analyzed by electrophoresis on a 1% agarose mini-gel to determine which reactions were successful in extending the sequence.

[0141] The extended nucleic acids were desalted and concentrated, transferred to 384-well plates, digested with CviJI cholera virus endonuclease (Molecular Biology Research, Madison Wis.), and sonicated or sheared prior to religation into pUC18 vector (Amersham Pharmacia Biotech). For shotgun sequencing, the digested nucleic acids were separated on low concentration (0.6 to 0.8%) agarose gels, fragments were excised, and agar digested with AGARACE enzyme (Promega). Extended clones were religated using T4 DNA ligase (New England Biolabs, Beverly Mass.) into pUC 18 vector (Amersham Pharmacia Biotech), treated with Pfu DNA polymerase (Stratagene) to fill-in restriction site overhangs, and transfected into competent E, coli cells. Transformed cells were selected on antibiotic-containing media, and individual colonies were picked and cultured overnight at 37° C. in 384-well plates in LB/2× carbenicillin liquid media.

[0142] The cells were lysed, and DNA was amplified by PCR using Taq DNA polymerase (Amersham Pharmacia Biotech) and Pfu DNA polymerase (Stratagene) with the following parameters: Step 1: 94° C., 3 min; Step 2: 94° C., 15 sec; Step 3: 60° C., 1 min; Step 4: 72° C., 2 min; Step 5: steps 2, 3, and 4 repeated 29 times; Step 6: 72° C., 5 min; Step 7: storage at 4° C. DNA was quantified using PICOGREEN reagent (Molecular Probes) as described above. Samples with low DNA recoveries were reamplified using the same conditions described above. Samples were diluted with 20% dimethylsulfoxide (DMSO; 1:2, v/v), and sequenced using DYENAMIC energy transfer sequencing primers and the DYENAMIC DIRECT cycle sequencing kit (Amersham Pharmacia Biotech) or the ABI PRISM BIGDYE terminator cycle sequencing kit (PE Biosystems).

[0143] IV. Assembly and Analysis of Sequences

[0144] Component nucleotide sequences from chromatograms were subjected to PHRED analysis (Phil's Revised Editing Program; Phil Green, University of Washington, Seattle Wash.) and assigned a quality score. The sequences having at least a required quality score were subject to various pre-processing algorithms to eliminate low quality 3′ ends, vector and linker sequences, polyA tails, Alu repeats, mitochondrial and ribosomal sequences, bacterial contamination sequences, and sequences smaller than 50 base pairs. Sequences were screened using the BLOCK 2 program (Incyte Pharmaceuticals), a motif analysis program based on sequence information contained in the SWISS-PROT and PROSITE databases (Bairoch et al. (1997) Nucleic Acids Res. 25:217-221; Attwood et al. (1997) J. Chem. Inf. Comput. Sci. 37:417-424).

[0145] Processed sequences were subjected to assembly procedures in which the sequences were assigned to bins, one sequence per bin. Sequences in each bin were assembled to produce consensus sequences, templates. Subsequent new sequences were added to existing bins using the Basic Local Alignment Search Tool (BLAST; Altschul (1993) J. Mol. Evol. 36:290-300; Altschul et al. (1990) J. Mol. Biol. 215:403-410; Karlin et al. (1988) Proc. Natl. Acad. Sci. 85:841-845), BLASTn (v.1.4, WashU), and CROSSMATCH software (Phil Green, supra). Candidate pairs were identified as all BLAST hits having a quality score greater than or equal to 150. Alignments of at least 82% local identity were accepted into the bin. The component sequences from each bin were assembled using PHRAP (Phil's Revised Alignment Program; Phil Green, supra). Bins with several overlapping component sequences were assembled using DEEP PHRAP (Phil Green, supra).

[0146] Bins were compared against each other, and those having local similarity of at least 82% were combined and reassembled. Reassembled bins having templates of insufficient overlap (less than 95% local identity) were re-split. Assembled templates were also subjected to analysis by STITCHER/EXON MAPPER algorithms which analyzed the probabilities of the presence of splice variants, alternatively spliced exons, splice junctions, differential expression of alternative spliced genes across tissue types, disease states, and the like. These resulting bins were subjected to several rounds of the above assembly procedures to generate the template sequences found in the LIFESEQ GOLD database (Incyte Pharmaceuticals).

[0147] The assembled templates were annotated using the following procedure. Template sequences were analyzed using BLASTn (v2.0, NCBI) versus GBpri (GenBank version 109). “Hits” were defined as an exact match having from 95% local identity over 200 base pairs through 100% local identity over 100 base pairs, or a homolog match having an E-value of 1×10⁻⁸. The hits were subjected to frameshift FASTx versus GENPEPT (GenBank version 109). In this analysis, a homolog match was defined as having an E-value of 1×10⁻⁸. The assembly method used above was described in “Database and System for Storing, Comparing and Displaying Related Biomolecular Sequence Information,” U.S. Ser. No. 09/276,534, filed Mar. 25, 1999, incorporated by reference herein, and the LIFESEQ GOLD user manual (Incyte Pharmaceuticals).

[0148] Following assembly, template sequences were subjected to motif, BLAST, Hidden Markov Model (HMM; Pearson and Lipman (1988) Proc Natl Acad Sci 85:2444-2448; Smith and Waterman (1981) J Mol Biol 147:195-197), and functional analyses, and categorized in protein hierarchies using methods described in “Database System Employing Protein Function Hierarchies for Viewing Biomolecular Sequence Data,” U.S. Ser. No. 08/812,290, filed Mar. 6, 1997; “Relational Database for Storing Biomolecule Information,” U.S. Ser. No. 08/947,845, filed October 9, 1997; “Project-Based Full-Length Biomolecular Sequence Database,” U.S. Pat. No. 5,953,727;; and “Relational Database and System for Storing Information Relating to Biomolecular Sequences,” U.S. Ser. No. 09/034,807, filed Mar. 4, 1998, all of which are incorporated by reference herein. Template sequences may be further queried against public databases such as the GenBank rodent, mammalian, vertebrate, eukaryote, prokaryote, and human EST databases.

[0149] V. Preparation of Microarrays

[0150] The polynucleotides present on the human UNIGEM V 2.0 microarray (Incyte Pharmaceuticals) represent template sequences derived from the LIFESEQ GOLD assembled human sequence database (incyte Pharmaceuticals) based on a non-redundant set of gene-oriented clusters derived from IMAGE (integrated molecular analysis of genomes and their expression) cDNA library clones and derived ESTs in the gbEST database (National Center for Biotechnology Information, National Library of Medicine, Bethesda, Md.). A single clone representing each particular template was used on the microarray. Polynucleotides were amplified from bacterial cells using primers complementary to vector sequences flanking the cDNA insert. Thirty cycles of PCR increased the initial quantity of polynucleotide from 1-2 ng to a final quantity greater than 5 μg. Amplified polynucleotides were then purified using SEPHACRYL400 columns (Amersham Pharmacia Biotech).

[0151] Purified polynucleotides were immobilized on polymer-coated glass slides. Glass microscope slides (Corning, Corning N.Y.) were cleaned by ultrasound in 0.1% SDS and acetone, with extensive distilled water washes between and after treatments. Glass slides were etched in 4% hydrofluoric acid (VWR Scientific Products Corporation, West Chester Pa.), washed extensively in distilled water, and coated with 0.05% aminopropyl silane (Sigma Aldrich, St. Louis Mo.) in 95% ethanol. Coated slides were cured in a 110° C. oven. polynucleotides were applied to the coated glass substrate using a procedure described in U.S. Pat. No. 5,807,522, incorporated hereinby reference. One microliter of the polynucleotide at an average concentration of 100 ng/ul was loaded into the open capillary printing element by a high-speed robotic apparatus which then deposited about 5 nl of polynucleotide per slide.

[0152] Microarrays were UV-crosslinked using a STRATALINKER UV-crosslinker (Stratagene), and then washed at room temperature once in 0.2% SDS and three times in distilled water. Non-specific binding sites were blocked by incubation of microarrays in 0.2% casein in phosphate buffered saline (Tropix, Bedford Mass.) for 30 minutes at 60° C. followed by washes in 0.2% SDS and distilled water as before.

[0153] VI. Preparation of Target Polynucleotides

[0154] Human THP-1 cells (American Type Culture Collection, Manassas Va.) were grown in RPMI1640 medium containing 10% fetal serum (v/v), 0.45% glucose (w/v), 10 mM Hepes, 1 mM sodium pyruvate, 1×10-⁻⁵ M β-mercaptoethanol, penicillin (100 units/ml) and streptomycin (100 mg/ml). For oxidized-LDL loading experiments, cells were seeded at a density of 1×10⁶ cells/il in medium containing 12-0-tetradecanoyl-phorbol-13-acetate (Research Biochemical International, Natick Mass.) at 1×10⁻⁷ M for 24 hr. The medium was then replaced by culture medium with or without 100 μg/ml of CuSO₄ “fully” oxidized LDL (Intracel, Rockville Md.) according to the method of Hammer et al. (1995; Arterio Thromb Vasc Biol 15:704-713). Medium was replaced every two days during the time of culture. Cells were treated with Ox-LDL over time points ranging from 30 minutes to 4 days. During this period, cells remained adherent and had a typical speckled Nile red staining pattern. RNA was prepared for expression profiling at 0, 0.5, 2.5, and 8 hours, and 1, 2, and 4 days of Ox-LDL exposure.

[0155] Total RNA was extracted using the RNA STAT-60 kit (Tel-Test, Friendswood Tex.). Poly(A) RNA was purified using the POLYATRACT mRNA isolation system (Promega). Each poly(A) RNA sample was reverse transcribed using MMLV reverse-transcriptase, 0.05 pg/μl oligo-dT primer (21mer), 1× first strand buffer, 0.03 units/ul RNase inhibitor, 500 uM DATP, 500 uM dGTP, 500 uM dTTP, 40 uM dCTP, and 40 uM either dCTP-Cy3 or dCTP-Cy5 (Amersham Pharmacia Biotech). The reverse transcription reaction was performed in a 25 ml volume containing 200 ng poly(A) RNA using the GEMBRIGHT kit (Incyte Pharmaceuticals). Specific control poly(A) RNAs (YCFR06, YCFR45, YCFR67, YCFR85, YCFR43, YCFR22, YCFR23, YCFR25, YCFR44, YCFR26) were synthesized by in vitro transcription from non-coding yeast genomic DNA (W. Lei, unpublished). As quantitative controls, control mRNAs (YCFR06, YCFR45, YCFR67, and YCFR85) at 0.002 ng, 0.02 ng, 0.2 ng, and 2 ng were diluted into reverse transcription reaction at ratios of 1:100,000, 1:10,000, 1:1000, 1:100 (w/w) to sample mRNA, respectively. To sample differential expression patterns, control mRNAs (YCFR43, YCFR22, YCFR23, YCFR25, YCFR44, YCFR26) were diluted into reverse transcription reaction at ratios of 1:3, 3:1, 1:10, 10:1, 1:25, 25:1 (w/w) to sample mRNA. Reactions were incubated at 37° C. for 2 hr, treated with 2.5 ml of 0.5M sodium hydroxide, and incubated for 20 minutes at 85° C. to the stop the reaction and degrade the RNA.

[0156] Probes were purified using two successive CHROMA SPIN 30 gel filtration spin columns (Clontech). Cy3- and Cy5-labeled reaction samples were combined as described below and ethanol precipitated using 1 ml of glycogen (1 mg/ml), 60 ml sodium acetate, and 300 ml of 100% ethanol. The probe was then dried to completion using a SpeedVAC system (Savant Instruments, Holbrook N.Y.) and resuspended in 14 μl 5×SSC/0.2% SDS.

[0157] VII. Hybridization and Detection

[0158] Hybridization reactions contained 9 μl of probe mixture consisting of 0.2 μg each of Cy3 and Cy5 labeled cDNA synthesis products from pairs of matched time point experimental and control cells in 5×SSC, 0.2% SDS hybridization buffer. The target mixture was heated to 65° C. for 5 minutes and was aliquoted onto the microarray surface and covered with an 1.8 cm² coverslip. The microarrays were transferred to a waterproof chamber having a cavity just slightly larger than a microscope slide. The chamber was kept at 100% humidity internally by the addition of 140 μl of 5×SSC in a corner of the chamber. The chamber containing the microarrays was incubated for about 6.5 hours at 60° C. The microarrays were washed for 10 min at 45° C. in low stringency wash buffer (1×SSC, 0.1% SDS), three times for 10 minutes each at 45° C. in high stringency wash buffer (0.1×SSC), and dried.

[0159] Reporter-labeled hybridization complexes were detected with a microscope equipped with an Innova 70 mixed gas 10 W laser (Coherent, Santa Clara Calif.) capable of generating spectral lines at 488 nm for excitation of Cy3 and at 632 nm for excitation of CyS. The excitation laser light was focused on the microarray using a 20× microscope objective (Nikon, Melville N.Y.). The slide containing the microarray was placed on a computer-controlled X-Y stage on the microscope and raster-scanned past the objective. The 1.8 cm×1.8 cm microarray used in the present example was scanned with a resolution of 20 micrometers.

[0160] In two separate scans, the mixed gas multiline laser excited the two fluorophores sequentially. Emitted light was split, based on wavelength, into two photomultiplier tube detectors (PMT R1477; Hamamatsu Photonics Systems, Bridgewater N.J.) corresponding to the two fluorophores. Appropriate filters positioned between the microarray and the photomultiplier tubes were used to filter the signals. The emission maxima of the fluorophores used were 565 nm for Cy3 and 650 nm for Cy5. Each microarray was typically scanned twice, one scan per fluorophore using the appropriate filters at the laser source, although the apparatus was capable of recording the spectra from both fluorophores simultaneously.

[0161] The sensitivity of the scans was calibrated using the signal intensity generated by a cDNA control species. Samples of the calibrating cDNA were separately labeled with the two fluorophores and identical amounts of each were added to the hybridization mixture. A specific location on the microarray contained a complementary DNA sequence, allowing the intensity of the signal at that location to be correlated with a weight ratio of hybridizing species of 1:100,000.

[0162] The output of the photomultiplier tube was digitized using a 12-bit RTI-835H analog-to-digital (AID) conversion board (Analog Devices, Norwood, Mass.) installed in an IBM-compatible PC computer. The digitized data were displayed as an image where the signal intensity was mapped using a linear 20-color transformation to a pseudocolor scale ranging from blue (low signal) to red (high signal). The data was also analyzed quantitatively. Where two different fluorophores were excited and measured simultaneously, the data were first corrected for optical crosstalk (due to overlapping emission spectra) between the fluorophores using each fluorophore's emission spectrum.

[0163] A grid was superimposed over the fluorescence signal image such that the signal from each spot was centered in each element of the grid. The fluorescence signal within each element was then integrated to obtain a numerical value corresponding to the average intensity of the signal. The software used for signal analysis was the GEMTOOLS gene expression analysis program (Incyte Pharmaceuticals).

[0164] VIII. Data Analysis and Results

[0165] An agglomerative cluster analysis was used to identify the typical response patterns and establish the relationships between the different gene expression profiles. Each gene measurement was first normalized by dividing the expression ratios by the maximum value for each time series. To emphasize the variation from one time point to the next, slopes were added to the expression vectors by taking the expression differences between consecutive time points. The Euclidean distance was used as a similarity measure for the expression responses.

[0166] The agglomerative algorithm employed constructs a dendrogram. Starting with N clusters each containing a single gene, at each step in the iteration the two closest clusters were merged into a larger cluster. The distance between clusters was defined as the distance between their average expression patterns. After N-1 steps all the data points were merged together. The clustering process defines a hierarchical tree. Genes were automatically assigned to a cluster by cutting the tree between the root and each gene branch with a set of 10 lines (“branch levels”) separated by fixed distances. The branch level cut-off forms a cluster. The tree was first ‘normalized’ so that each branch was at the same distance from the root. In order to preserve the distance between the closest genes, the tree was distorted at the branch furthest from the leaf. The number of branches intersecting at each branch level of the tree equals the number of clusters at that level.

[0167] Division of the tree at branch level 5 divides the genes into 7 clusters of gene expression which include 276 differentially expressed genes and splice variants. In tables 1, columns 4through 10 show the level of gene expression at each time point in response to Ox-LDL exposure vs. no Ox-LDL. Differential regulation has been normalized to a maximum value of 1.0 for each gene. White represents relative expression in response to Ox-LDL ranging from 0-25% of maximum for that particular gene; light gray from 26-50%; dark gray from 51-75%; black from 76-100%.

[0168] IX. Complementary Nucleic Acid Molecules

[0169] Molecules complementary to the polynucleotide, or a fragment thereof, are used to detect, decrease, or inhibit gene expression Although use of oligonucleotides comprising from about 15 to about 30 base pairs is described, the same procedure is used with larger or smaller fragments or their derivatives (PNAs). Oligonucleotides are selected using OLIGO 4.06 software (National Biosciences) and SEQ ED NOs:1-278. To inhibit transcription by preventing promoter binding, a complementary oligonucleotide is designed to bind to the most unique 5′ sequence, most preferably about 10 nucleotides before the initiation codon of the open reading frame. To inhibit translation, a complementary oligonucleotide is designed to prevent ribosomal binding to the mRNA encoding the protein.

[0170] In addition to using antisense molecules constructed to interrupt transcription or translation, modifications of gene expression can be obtained by designing antisense molecules to genomic sequences (such as enhancers or introns) or even to trans-acting regulatory genes. Similarly, antisense inhibition can be achieved using Hogeboom base-pairing methodology, also known as “triple helix” base pairing. Antisense molecules involved in triple helix pairing compromise the ability of the double helix to open sufficiently for the binding of polymerases, transcription factors, or regulatory molecules.

[0171] Such antisense molecules are placed in expression vectors and used to transform preferred cells or tissues. This may include introduction of the expression vector into a cell line to test efficacy; into an organ, tumor, synovial cavity, or the vascular system for transient or short term therapy; or into a stem cell or other reproducing lineage for long term or stable gene therapy. Transient expression may last for a month or more with a non-replicating vector and for three months or more if appropriate elements for inducing vector replication are used in the transformation/expression system.

[0172] Stable transformation of appropriate dividing cells with a vector encoding the antisense molecule can produce a transgenic cell line, tissue, or organism (U.S. Pat. No. 4,736,866). Those cells that assimilate and replicate sufficient quantities of the vector to allow stable integration also produce enough antisense molecules to compromise or entirely eliminate activity of the polynucleotide.

[0173] X. Hybridization Technologies and Analyses

[0174] Hybridization technology utilizes a variety of substrates such as polymer coated glass slides and nylon membranes. Arranging elements on polymer coated slides is described in Example V; probe preparation and hybridization and analysis using polymer coated slides is described in examples VI and VII, respectively.

[0175] Polynucleotides are applied to a membrane substrate by one of the following methods. A mixture of polynucleotides is fractionated by gel electrophoresis and transferred to a nylon membrane by capillary transfer. Alternatively, the polynucleotides are individually ligated to a vector and inserted into bacterial host cells to form a library. The polynucleotides are then arranged on a substrate by one of the following methods. In the first method, bacterial cells containing individual clones are robotically picked and arranged on a nylon membrane. The membrane is placed on LB agar containing selective agent (carbenicimin, kanamycin, ampicillin, or cnloramphenicol depending on the vector used) and incubated at 37° C. for 16 hr. The membrane is removed from the agar and consecutively placed colony side up in 10% SDS, denaturing solution (1.5 M NaCl, 0.5 M NaOH), neutralizing solution (1.5 M NaCl, 1 M Tris, pH 8.0), and twice in 2×SSC for 10 min each. The membrane is then UV irradiated in a STRATALINKER UV-crosslinker (Stratagene).

[0176] In the second method, polynucleotides are amplified from bacterial vectors by thirty cycles of PCR using primers complementary to vector sequences flanking the insert. PCR amplification increases a starting concentration of 1-2 ng nucleic acid to a final quantity greater than 5 μg. Amplified nucleic acids from about 400 bp to about 5000 bp in length are purified using SEPHACRYL400 beads (Amersham Pharmacia Biotech). Purified nucleic acids are arranged on a nylon membrane manually or using a dot/slot blotting manifold and suction device and are immobilized by denaturation, neutralization, and UV irradiation as described above.

[0177] Hybridization probes derived from polynucleotides of the Sequence Listing are employed for screening cDNAs, mRNAs, or genomic DNA in membrane-based hybridizations. Probes are prepared by diluting the polynucleotides to a concentration of 40-50 ng in 45 μl TE buffer, denaturing by heating to 100° C. for five min, and briefly centrifuging. The denatured polynucleotide is then added to a REDIPRIME tube (Amersham Pharmacia Biotech), gently mixed until blue color is evenly distributed, and briefly centrifuged. Five microliters of [³²P]dCTP is added to the tube, and the contents are incubated at 37° C. for 10 min. The labeling reaction is stopped by adding 5 μl of 0.2M EDTA, and probe is purified from unincorporated nucleotides using a PROBEQUANT G-50 microcolumn (Amersham Pharmacia Biotech). The purified probe is heated to 100° C. for five min, snap cooled for two min on ice.

[0178] Membranes are pre-hybridized in hybridization solution containing 1% Sarkosyl and 1× high phosphate buffer (0.5 M NaCl, 0.1 M Na₂HPO₄, 5 mM EDTA, pH 7) at 55° C. for two hr. The probe, diluted in 15 ml fresh hybridization solution, is then added to the membrane. The membrane is hybridized with the probe at 55° C. for 16 hr. Following hybridization, the membrane is washed for 15 min at 25° C. in 1 mM Tris (pH 8.0), 1% Sarkosyl, and four times for 15 min each at 25° C. in 1 mM Tris (pH 8.0). To detect hybridization complexes, XOMAT-AR film (Eastman Kodak, Rochester N.Y.) is exposed to the membrane overnight at −70° C., developed, and examined visually.

[0179] XI. Expression of the Encoded Protein

[0180] Expression and purification of a protein encoded by a polynucleotide of the invention is achieved using bacterial or virus-based expression systems. For expression in bacteria, cDNA is subcloned into a vector containing an antibiotic resistance gene and an inducible promoter that directs high levels of cDNA transcription Examples of such promoters include, but are not limited to, the trp-lac (tac) hybrid promoter and the T5 or T7 bacteriophage promoter in conjunction with the lac operator regulatory element. Recombinant vectors are transformed into bacterial hosts, such as BL21(DE3). Antibiotic resistant bacteria express the protein upon induction with isopropyl beta-D-thiogalactopyranoside (IPTG). Expression in eukaryotic cells is achieved by infecting Spodoptera frugiperda (Sf9) insect cells with recombinant baculovirus, Autogaphica californica nuclear polyhedrosis virus. The polyhedrin gene of baculovirus is replaced with the polynucleotide by either homologous recombination or bacterial-mediated transposition involving transfer plasmid intermediates. Viral infectivity is maintained and the strong polyhedrin promoter drives high levels of polynucleotide transcription.

[0181] For ease of purification, the protein is synthesized as a fusion protein with glutathione-S-transferase (GST; Amersham Pharmacia Biotech) or a similar alternative such as FLAG. The fusion protein is purified on immobilized glutathione under conditions that maintain protein activity and antigenicity. After purification, the GST moiety is proteolytically cleaved from the protein with thrombin. A fusion protein with FLAG, an 8-amino acid peptide, is purified using commercially available monoclonal and polyclonal anti-FLAG antibodies (Eastman Kodak, Rochester N.Y.).

[0182] XII. Production of Specific Antibodies

[0183] A denatured polypeptide from a reverse phase HPLC separation is obtained in quantities up to 75 mg. This denatured protein is used to immunize mice or rabbits following standard protocols. About 100 μg is used to immunize a mouse, while up to 1 mg is used to immunize a rabbit. The denatured polypeptide is radioiodinated and incubated with murine B-cell hybridomas to screen for monoclonal antibodies. About 20 mg of polypeptide is sufficient for labeling and screening several thousand clones.

[0184] In another approach, the amino acid sequence translated from a polynucleotide of the invention is analyzed using PROTEAN software (DNASTAR) to determine regions of high inmunogenicity. The optimal sequences for immunization are usually at the C-terminus, the N-terminus, and those intervening, hydrophilic regions of the polypeptide that are likely to be exposed to the external environment when the polypeptide is in its natural conformation. Typically, oligopeptides about 15 residues in length are synthesized using an ABI 431 Peptide synthesizer (PE Biosystems) using Fmoc-chemistry and then coupled to keyhole limpet hemocyanin (KLH; Sigma Aldrich) by reaction with M-maleimidobenzoyl-N-hydroxysuccinimide ester. If necessary, a cysteine may be introduced at the N-terminus of the peptide to permit coupling to KLH. Rabbits are immunized with the oligopeptide-KLH complex in complete Freund's adjuvant. The resulting antisera are tested for antipeptide activity by binding the peptide to plastic, blocking with 1% BSA, reacting with rabbit antisera, washing, and reacting with radioiodinated goat anti-rabbit IgG.

[0185] Hybridomas are prepared and screened using standard techniques. Hybridomas of interest are detected by screening with radioiodinated polypeptide to identify those fusions producing a monoclonal antibody specific for the polypeptide. In a typical protocol, wells of 96 well plates (FAST, Becton-Dickinson, Palo Alto Calif.) are coated with affinity-purified, specific rabbit-anti-mouse (or suitable anti-species Ig) antibodies at 10 mg/ml. The coated wells are blocked with 1% BSA and washed and exposed to supernatants from hybridomas. After incubation, the wells are exposed to radiolabeled polypeptide at 1 mg/ml. Clones producing antibodies bind a quantity of labeled polypeptide that is detectable above background.

[0186] Such clones are expanded and subjected to 2 cycles of cloning at 1 cell/3 wells. Cloned hybridomas are injected into pristane-treated mice to produce ascites, and monoclonal antibody is purified from the ascitic fluid by affinity chromatography on protein A (Amersham Pharmacia Biotech). Monoclonal antibodies with affinities of at least 10⁸ M⁻¹, preferably 10⁹ to 10¹⁰ M⁻¹or stronger, are made by procedures well known in the art.

[0187] XIH. Purification of Naturally Occurring Protein Using Specific Antibodies

[0188] Naturally occurring or recombinant protein is substantially purified by immunoaffinity chromatography using antibodies specific for the protein. An immunoaffinity column is constructed by covalently coupling the antibody to CNBr-activated SEPHAROSE resin (Amersham Pharmacia Biotech). Media containing the protein is passed over the immunoaffinity column, and the column is washed using high ionic strength buffers in the presence of detergent to allow preferential absorbance of the protein. After coupling, the protein is eluted from the column using a buffer of pH 2-3 or a high concentration of urea or thiocyanate ion to disrupt antibody/protein binding, and the protein is collected.

[0189] XIV. Screening Molecules for Specific Binding

[0190] The polynucleotide or fragments thereof are labeled with ³²P-dCTP, Cy3-dCTP, Cy5-dCTP (Amersham Pharmacia Biotech), or the protein or portions thereof are labeled with BIODIPY or FITC (Molecular Probes). A library or a plurality of candidate molecules or compounds previously arranged on a substrate are incubated in the presence of labeled polynucleotide or protein. After incubation under conditions for a polynucleotide or protein, the substrate is washed. Any position on the substrate retaining label, that indicates specific binding or complex formation, identifies a ligand. Data obtained using different concentrations of the polynucleotide or polypeptide are used to calculate affinity between the labeled polynucleotide or protein and the bound ligand.

[0191] All publications and patents mentioned in the above specification are herein incorporated by reference. Various modifications and variations of the described method and system of the invention will be apparent to those skilled in the art without departing from the scope and spirit of the invention. Although the invention has been described in connection with specific preferred embodiments, it should be understood that the invention as claimed should not be unduly limited to such specific embodiments. Indeed, various modifications of the above-described modes for carrying out the invention which are obvious to those skilled in the field of molecular biology or related fields are intended to be within the scope of the following claims.

TABLE 1

| SEQ ID NO | Incyte ID | Gene Annotation | 0 h | 0.5 h | 2.5 h | 8 h | 1 d | 2 d | 4 d | Cluster |
|---|---|---|---|---|---|---|---|---|---|---|
| 1 | 440295.1 | Human SBC2 mRNA for sodium bicarbonate transporter 2, complete cds. | [chemical structure] | [chemical structure] | [chemical structure] | [chemical structure] | [chemical structure] | [chemical structure] | [chemical structure] | 1 |
| 2 | g34387 | annexin 1 (lipocortin I) | [chemical structure] | [chemical structure] | [chemical structure] | [chemical structure] | [chemical structure] | [chemical structure] | [chemical structure] | 2 |
| 3 | 247178.2 | sperm surface protein | [chemical structure] | [chemical structure] | [chemical structure] | [chemical structure] | [chemical structure] | [chemical structure] | [chemical structure] | 2 |
| 4 | 567938 | integrin, alpha X (antigen CD11C (p150), alpha polypeptide) | [chemical structure] | [chemical structure] | [chemical structure] | [chemical structure] | [chemical structure] | [chemical structure] | [chemical structure] | 2 |
| 5 | 351122.2 | integrin, beta 3 (platelet glycoprotein IIIa, antigen CD61) | [chemical structure] | [chemical structure] | [chemical structure] | [chemical structure] | [chemical structure] | [chemical structure] | [chemical structure] | 2 |
| 6 | 481379.9 | paired basic amino acid cleaving enzyme (furin, membrane associated receptor protein) | [chemical structure] | [chemical structure] | [chemical structure] | [chemical structure] | [chemical structure] | [chemical structure] | [chemical structure] | 2 |
| 7 | 215391.7 | phosphogluconate dehydrogenase | [chemical structure] | [chemical structure] | [chemical structure] | [chemical structure] | [chemical structure] | [chemical structure] | [chemical structure] | 2 |
| 8 | 243812.1 | protein kinase mitogen-activated 13 | [chemical structure] | [chemical structure] | [chemical structure] | [chemical structure] | [chemical structure] | [chemical structure] | [chemical structure] | 2 |
| 9 | 1085755.1 | folate receptor 1 (adult) | [chemical structure] | [chemical structure] | [chemical structure] | [chemical structure] | [chemical structure] | [chemical structure] | [chemical structure] | 2 |
| 10 | 347809.3 | solute carrier family 6 (neurotransmitter transporter, taurine), member 6 | [chemical structure] | [chemical structure] | [chemical structure] | [chemical structure] | [chemical structure] | [chemical structure] | [chemical structure] | 2 |
| 11 | 331734.4 | prostaglandin-endoperoxide synthase 1 (prostaglandin G/H synthase and cyclooxygenase) | [chemical structure] | [chemical structure] | [chemical structure] | [chemical structure] | [chemical structure] | [chemical structure] | [chemical structure] | 2 |
| 12 | 116840.38 | interferon regulatory factor 3 | [chemical structure] | [chemical structure] | 0.4 | [chemical structure] | [chemical structure] | [chemical structure] | [chemical structure] | 2 |
| 13 | 903565.11 | proprotein convertase subtilisin/kexin type 4 | [chemical structure] | [chemical structure] | [chemical structure] | [chemical structure] | [chemical structure] | [chemical structure] | [chemical structure] | 2 |
| 14 | 903565.8 | Human mRNA for PACE4E-I, complete cds. | [chemical structure] | [chemical structure] | 0.5 | [chemical structure] | [chemical structure] | [chemical structure] | [chemical structure] | |
| 15 | 474310.13 | transglutaminase 2 (C polypeptide, protein-glutamine-gamma-glutamyltransferase) | [chemical structure] | [chemical structure] | [chemical structure] | 0.2 | [chemical structure] | [chemical structure] | [chemical structure] | 2 |
| 16 | 413006.13 | differentiated Embryo Chondrocyte expressed gene 1 | [chemical structure] | [chemical structure] | [chemical structure] | [chemical structure] | [chemical structure] | [chemical structure] | [chemical structure] | 2 |
| 17 | 76460.2 | pyridoxal (pyridoxine, vitamin B6) kinase | [chemical structure] | [chemical structure] | [chemical structure] | [chemical structure] | [chemical structure] | [chemical structure] | [chemical structure] | 2 |
| 18 | 474374.4 | pim-1 oncogene | [chemical structure] | [chemical structure] | [chemical structure] | [chemical structure] | [chemical structure] | [chemical structure] | [chemical structure] | 2 |
| 19 | 427792.8 | cathepsin B | [chemical structure] | [chemical structure] | [chemical structure] | [chemical structure] | [chemical structure] | [chemical structure] | [chemical structure] | 2 |
| 20 | 364482.3 | carnitine palmitoyltransferase I, liver | [chemical structure] | [chemical structure] | [chemical structure] | [chemical structure] | [chemical structure] | [chemical structure] | [chemical structure] | 2 |
| 21 | 978487.1 | carnitine palmitoyltranserase I, liver | [chemical structure] | [chemical structure] | [chemical structure] | [chemical structure] | [chemical structure] | [chemical structure] | [chemical structure] | 2 |
| 22 | 410626.2 | Human retinoid X receptor-gamma mRNA, complete cds | [chemical structure] | [chemical structure] | [chemical structure] | [chemical structure] | [chemical structure] | [chemical structure] | [chemical structure] | 2 |
| 23 | 234480.6 | glutaredoxin (thioltransferase) | [chemical structure] | 0.2 | 0.2 | 0.2 | [chemical structure] | [chemical structure] | [chemical structure] | 3 |
| 24 | 253542.2 | dual specificity phosphatase 5 | [chemical structure] | 0.2 | 0.2 | [chemical structure] | [chemical structure] | [chemical structure] | [chemical structure] | 3 |
| 25 | 234202.24 | microsomal glutathione S-transferase 1 | [chemical structure] | [chemical structure] | [chemical structure] | [chemical structure] | [chemical structure] | [chemical structure] | [chemical structure] | 3 |
| 26 | 253946.4 | interleukin 6 signal transducer (gp130, oncostatin M receptor) | [chemical structure] | [chemical structure] | [chemical structure] | [chemical structure] | [chemical structure] | [chemical structure] | [chemical structure] | 3 |
| 27 | 348801.1 | pro-platelet basic protein | [chemical structure] | [chemical structure] | [chemical structure] | [chemical structure] | [chemical structure] | [chemical structure] | [chemical structure] | 3 |
| 28 | 980611.1 | matrilin 1, cartilage matrix protein | [chemical structure] | [chemical structure] | [chemical structure] | [chemical structure] | [chemical structure] | [chemical structure] | [chemical structure] | 3 |
| 29 | 283885.8 | dual-specificity tyrosine-(Y)-phosphorylation regulated kinase 4 | [chemical structure] | [chemical structure] | [chemical structure] | [chemical structure] | [chemical structure] | [chemical structure] | [chemical structure] | |
| 30 | 348196.33 | antigen identified by monoclonal antibodies 4F2, TRA1.10, TROP4, and T43 | [chemical structure] | [chemical structure] | [chemical structure] | [chemical structure] | [chemical structure] | [chemical structure] | [chemical structure] | 3 |
| 31 | 256009.4 | AHNAK nucleoprotein (desmoyokin) | [chemical structure] | [chemical structure] | [chemical structure] | [chemical structure] | [chemical structure] | [chemical structure] | [chemical structure] | 3 |
| 32 | 481594.12 | Human RACH1 (RACH1) mRNA, complete cds | [chemical structure] | [chemical structure] | [chemical structure] | [chemical structure] | [chemical structure] | [chemical structure] | [chemical structure] | 3 |
| 33 | 978788.1 | Human RACH1 (RACH1) mRNA, complete cds | [chemical structure] | [chemical structure] | [chemical structure] | [chemical structure] | [chemical structure] | [chemical structure] | [chemical structure] | 3 |
| 34 | 335171.1 | integrin, alpha 2 (CD49B, alpha 2 subunit of VLA-2 receptor) | [chemical structure] | [chemical structure] | [chemical structure] | [chemical structure] | [chemical structure] | [chemical structure] | [chemical structure] | 3 |
| 35 | 998433.2 | ESTs, Highly similar to DIAMINE ACETYLTRANSFERASE ([H. sapiens] | [chemical structure] | [chemical structure] | [chemical structure] | [chemical structure] | [chemical structure] | [chemical structure] | [chemical structure] | 2 |
| 36 | 221928.9 | ESTs | 0.3 | 0.3 | [chemical structure] | [chemical structure] | [chemical structure] | [chemical structure] | [chemical structure] | 2 |
| 37 | 331291.3 | Homo sapiens mRNA for KIAA0291 gene, partial cds | 0.4 | [chemical structure] | [chemical structure] | [chemical structure] | [chemical structure] | [chemical structure] | [chemical structure] | 2 |
| 38 | 233331.3 | Homo sapiens KIAA0439 mRNA, partial cds | 0.4 | [chemical structure] | [chemical structure] | [chemical structure] | [chemical structure] | [chemical structure] | [chemical structure] | 2 |
| 39 | 474682.2 | ESTs, Weakly similar to W01A11.2 gene product [C. elegans] | [chemical structure] | [chemical structure] | [chemical structure] | [chemical structure] | [chemical structure] | [chemical structure] | [chemical structure] | 2 |
| 40 | 3161.7 | ESTs, Weakly similar to (define not available 4529890) [H. sapiens] | [chemical structure] | [chemical structure] | [chemical structure] | [chemical structure] | [chemical structure] | [chemical structure] | [chemical structure] | 3 |
| 41 | 984248.1 | ESTs | [chemical structure] | [chemical structure] | [chemical structure] | [chemical structure] | [chemical structure] | [chemical structure] | [chemical structure] | 3 |
| 42 | 196590.2 | ESTs | [chemical structure] | [chemical structure] | [chemical structure] | [chemical structure] | [chemical structure] | [chemical structure] | [chemical structure] | 3 |
| 43 | 255109.1 | ESTs | [chemical structure] | [chemical structure] | [chemical structure] | [chemical structure] | [chemical structure] | [chemical structure] | [chemical structure] | 3 |
| 44 | 238622.2 | Human clone 46690 brain expressed mRNA from Chromosome X | [chemical structure] | [chemical structure] | [chemical structure] | [chemical structure] | [chemical structure] | [chemical structure] | [chemical structure] | 3 |
| 45 | 334385.3 | Homo sapiens mRNA for KIAA0284 gene, partial cds | [chemical structure] | [chemical structure] | [chemical structure] | [chemical structure] | [chemical structure] | [chemical structure] | [chemical structure] | 3 |
| 46 | 998997.1 | ESTs | [chemical structure] | [chemical structure] | [chemical structure] | [chemical structure] | [chemical structure] | [chemical structure] | [chemical structure] | 7 |
| 47 | 200578.1 | ESTs | 0.2 | 0.2 | 0.2 | [chemical structure] | [chemical structure] | [chemical structure] | [chemical structure] | 3 |
| 48 | 208134.1 | ESTs | 0.2 | [chemical structure] | 0.2 | 0.2 | [chemical structure] | [chemical structure] | [chemical structure] | 3 |
| 49 | 153659.2 | interleukin 1 receptor antagonist | 0.2 | [chemical structure] | [chemical structure] | [chemical structure] | [chemical structure] | [chemical structure] | [chemical structure] | 1 |
| 50 | 241930.15 | liver X receptor, alpha | 0.2 | [chemical structure] | [chemical structure] | [chemical structure] | 0.4 | [chemical structure] | [chemical structure] | 1 |
| 51 | 413466.5 | adipose differentiation-related protein; adipophilin | 0.1 | 0.1 | 0.2 | [chemical structure] | [chemical structure] | [chemical structure] | [chemical structure] | 1 |
| 52 | 3249239 | colony stimulating factor 1 (macrophage) | 0.2 | [chemical structure] | 0.2 | [chemical structure] | [chemical structure] | [chemical structure] | [chemical structure] | 1 |
| 53 | 337518.18 | CD36 antigen (collagen type I receptor, thrombospondin receptor) | 0.2 | [chemical structure] | [chemical structure] | [chemical structure] | [chemical structure] | [chemical structure] | [chemical structure] | 2 |
| 54 | g3116213 | SH3 binding protein | 0.2 | [chemical structure] | [chemical structure] | [chemical structure] | [chemical structure] | [chemical structure] | [chemical structure] | 3 |
| 55 | g5912216 | SH3 binding protein | 0.2 | [chemical structure] | [chemical structure] | [chemical structure] | [chemical structure] | [chemical structure] | [chemical structure] | 3 |
| 56 | 992917.1 | ferritin, heavy polypeptide 1 | 0.2 | 0.2 | 0.2 | 0.2 | [chemical structure] | [chemical structure] | [chemical structure] | 1 |
| 57 | 411424.12 | LIM and senescent cell antigen-like domains 1 | 0.2 | [chemical structure] | [chemical structure] | [chemical structure] | [chemical structure] | [chemical structure] | [chemical structure] | 1 |
| 58 | 995600.17 | Homo sapiens clone 24649 mRNA sequence | 0.2 | 0.2 | 0.2 | 0.2 | 0.2 | 0.2 | [chemical structure] | 1 |
| 59 | 441292.7 | epithelial membrane protein 1 | 0.2 | 0.2 | 0.2 | 0.2 | 0.3 | [chemical structure] | [chemical structure] | 1 |
| 60 | 42176.5 | Down syndrome dandidate region 1 | 0.1 | 0.2 | 0.2 | [chemical structure] | 0.2 | [chemical structure] | [chemical structure] | 1 |
| 61 | 234537.3 | 5′ nucleotidase (CD73) | 0.2 | 0.2 | 0.2 | 0.2 | [chemical structure] | [chemical structure] | [chemical structure] | 1 |
| 62 | 4704568.21 | uridine phosphorylase | 0.2 | 0.2 | 0.2 | 0.2 | [chemical structure] | [chemical structure] | [chemical structure] | 1 |
| 63 | 240120.3 | diphtheria toxin receptor (heparin-binding epidermal growth factor-like growth factor) | 0.1 | 0.1 | 0.1 | 0.1 | [chemical structure] | [chemical structure] | [chemical structure] | 1 |
| 64 | 28779.3 | small inducible cytokine subfamily A (Cys-Cys), member 20 | 0.1 | 0.1 | 0.1 | 0.2 | 0.1 | 0.2 | [chemical structure] | 1 |
| 65 | 238627.2 | BCL2-related protein A1 | [chemical structure] | [chemical structure] | [chemical structure] | [chemical structure] | 0.1 | [chemical structure] | [chemical structure] | 1 |
| 66 | 254107.1 | thrombomodulin | 0.2 | 0.2 | 0.1 | 0.1 | [chemical structure] | [chemical structure] | [chemical structure] | 4 |
| 67 | 330908.2 | leukemia inhibitory factor (cholinergic differentiation factor) | [chemical structure] | [chemical structure] | [chemical structure] | 0.2 | [chemical structure] | [chemical structure] | [chemical structure] | 4 |
| 68 | g687589 | Human (AFlq) mRNA, complete cds | [chemical structure] | [chemical structure] | [chemical structure] | [chemical structure] | [chemical structure] | [chemical structure] | [chemical structure] | 1 |
| 69 | 197975.11 | KIAA0763 gene product | [chemical structure] | [chemical structure] | [chemical structure] | [chemical structure] | [chemical structure] | [chemical structure] | [chemical structure] | 1 |
| 70 | 227928.2 | KIAA0429 gene product | [chemical structure] | [chemical structure] | [chemical structure] | [chemical structure] | [chemical structure] | [chemical structure] | [chemical structure] | 1 |
| 71 | 248785.7 | ESTs | [chemical structure] | [chemical structure] | [chemical structure] | 0.2 | [chemical structure] | 0.2 | [chemical structure] | 1 |
| 72 | 977757.3 | KIAA0237 gene product | [chemical structure] | [chemical structure] | [chemical structure] | [chemical structure] | [chemical structure] | [chemical structure] | [chemical structure] | 1 |
| 73 | 232773.2 | ESTs | [chemical structure] | [chemical structure] | [chemical structure] | [chemical structure] | [chemical structure] | [chemical structure] | [chemical structure] | 1 |
| 74 | g6634024 | Human mRNA for KIAA0379 gene, partial cds | [chemical structure] | [chemical structure] | [chemical structure] | [chemical structure] | [chemical structure] | [chemical structure] | [chemical structure] | 1 |
| 75 | g4589571 | ESTs, Weakly similar to DAP-1 beta [H. sapiens] | [chemical structure] | [chemical structure] | [chemical structure] | [chemical structure] | [chemical structure] | [chemical structure] | [chemical structure] | 1 |
| 76 | 334370.3 | KIAA0024 gene product | [chemical structure] | [chemical structure] | [chemical structure] | [chemical structure] | [chemical structure] | [chemical structure] | [chemical structure] | 1 |
| 77 | 980461.1 | ESTs | [chemical structure] | [chemical structure] | [chemical structure] | [chemical structure] | [chemical structure] | [chemical structure] | [chemical structure] | 1 |
| 78 | 422969.5 | KIAA0598 gene product | [chemical structure] | [chemical structure] | [chemical structure] | [chemical structure] | [chemical structure] | [chemical structure] | [chemical structure] | 2 |
| 79 | 244150.4 | Human mRNA for KIAA0194 gene, partial cds | [chemical structure] | [chemical structure] | [chemical structure] | [chemical structure] | [chemical structure] | [chemical structure] | [chemical structure] | 2 |
| 80 | 410257.11 | ESTs | [chemical structure] | [chemical structure] | [chemical structure] | [chemical structure] | [chemical structure] | [chemical structure] | [chemical structure] | 2 |
| 81 | 28253.3 | Homo sapiens chromosome 19, cosmid R28379 | [chemical structure] | [chemical structure] | [chemical structure] | [chemical structure] | 0.2 | [chemical structure] | [chemical structure] | 1 |
| 82 | g31670 | guanylate cyclase 1, soluble, alpha 2 | [chemical structure] | [chemical structure] | [chemical structure] | [chemical structure] | [chemical structure] | [chemical structure] | [chemical structure] | 1 |
| 83 | 977552.1 | musculin (activated B-cell factor-1) | [chemical structure] | [chemical structure] | [chemical structure] | [chemical structure] | [chemical structure] | [chemical structure] | [chemical structure] | 1 |
| 84 | 977552.2 | Human activated B-cell factor-1 (ABF-1) mRNA, complete cds. | [chemical structure] | [chemical structure] | [chemical structure] | [chemical structure] | [chemical structure] | [chemical structure] | [chemical structure] | 1 |
| 85 | 347829.6 | yes-associated protein 65 kDa | [chemical structure] | [chemical structure] | [chemical structure] | [chemical structure] | [chemical structure] | [chemical structure] | [chemical structure] | 1 |
| 86 | 251776.11 | integrin, beta 5 | [chemical structure] | [chemical structure] | [chemical structure] | [chemical structure] | [chemical structure] | [chemical structure] | [chemical structure] | 1 |
| 87 | 343674.9 | GTP-binding protein overexpressed in skeletal muscle | [chemical structure] | [chemical structure] | [chemical structure] | [chemical structure] | [chemical structure] | [chemical structure] | [chemical structure] | 1 |
| 88 | 479136.1 | core-binding factor, runt domain, alpha subunit 3 | [chemical structure] | [chemical structure] | [chemical structure] | [chemical structure] | 0.4 | [chemical structure] | [chemical structure] | 1 |
| 89 | 1078147.1 | early development regulator 2 (homolog of polyhomeotic 2) | [chemical structure] | [chemical structure] | [chemical structure] | [chemical structure] | [chemical structure] | [chemical structure] | [chemical structure] | 1 |
| 90 | 474275.1 | podocalyxin-like | [chemical structure] | [chemical structure] | [chemical structure] | [chemical structure] | [chemical structure] | [chemical structure] | [chemical structure] | 1 |
| 91 | 1320658 | fibulin 1 | [chemical structure] | [chemical structure] | [chemical structure] | [chemical structure] | 0.4 | [chemical structure] | [chemical structure] | 1 |
| 92 | 242114.16 | PTK2 protein tyrosine kinase 2 | [chemical structure] | [chemical structure] | 0.5 | [chemical structure] | 0.4 | [chemical structure] | [chemical structure] | 1 |
| 93 | 445186.7 | LIM domain only 4 | [chemical structure] | [chemical structure] | [chemical structure] | [chemical structure] | [chemical structure] | [chemical structure] | [chemical structure] | 1 |
| 94 | 474496.2 | toll-like receptor 2 | [chemical structure] | [chemical structure] | [chemical structure] | [chemical structure] | [chemical structure] | [chemical structure] | [chemical structure] | 1 |
| 95 | 257114.7 | solute carrier family 31 (copper transporters), member 2 | [chemical structure] | [chemical structure] | 0.5 | [chemical structure] | [chemical structure] | [chemical structure] | [chemical structure] | 1 |
| 96 | 984005.1 | high-mobility group (nonhistone chromosomal) protein isoform I-C | [chemical structure] | [chemical structure] | [chemical structure] | [chemical structure] | 0.3 | [chemical structure] | [chemical structure] | 1 |
| 97 | 977667.1 | complement component 5 receptor 1 (C5a ligand) | [chemical structure] | [chemical structure] | [chemical structure] | [chemical structure] | [chemical structure] | [chemical structure] | [chemical structure] | 1 |
| 98 | 996862.4 | TG-interacting factor (TALE family homeobox) | [chemical structure] | [chemical structure] | 0.5 | [chemical structure] | [chemical structure] | [chemical structure] | [chemical structure] | 1 |
| 99 | 364940.19 | sparc/osteonectin, cwcv and kazal-like domains proteoglycan (testican) | [chemical structure] | [chemical structure] | [chemical structure] | [chemical structure] | 0.1 | [chemical structure] | [chemical structure] | 1 |
| 100 | 1041140.4 | Fc fragment of IgG, low affinity IIIa, receptor for (CD16) | [chemical structure] | [chemical structure] | [chemical structure] | [chemical structure] | [chemical structure] | [chemical structure] | [chemical structure] | 1 |
| 101 | 408246.2 | leupaxin | [chemical structure] | [chemical structure] | [chemical structure] | [chemical structure] | [chemical structure] | [chemical structure] | [chemical structure] | 1 |
| 102 | 902740.4 | aminolevulinate, delta-, dehydratase | [chemical structure] | [chemical structure] | [chemical structure] | [chemical structure] | [chemical structure] | [chemical structure] | [chemical structure] | 1 |
| 103 | 475486.9 | peptidylprolyl isomerase F (cyclophilin F) | [chemical structure] | [chemical structure] | [chemical structure] | [chemical structure] | [chemical structure] | [chemical structure] | [chemical structure] | 1 |
| 104 | 233778.9 | acid sphingomyelinase-like phosphodiesterase | [chemical structure] | [chemical structure] | [chemical structure] | [chemical structure] | [chemical structure] | [chemical structure] | [chemical structure] | 1 |
| 105 | 350392.3 | myosin IC | [chemical structure] | [chemical structure] | [chemical structure] | [chemical structure] | [chemical structure] | [chemical structure] | [chemical structure] | 1 |
| 106 | 458045.4 | integrin, alpha 5 (fibronectin receptor, alpha polypeptide) | [chemical structure] | [chemical structure] | [chemical structure] | [chemical structure] | [chemical structure] | [chemical structure] | [chemical structure] | 1 |
| 107 | 471362.17 | Homo sapiens myosin light chain kinase (MLCK) mRNA, complete cds | [chemical structure] | [chemical structure] | [chemical structure] | [chemical structure] | [chemical structure] | [chemical structure] | [chemical structure] | 1 |
| 108 | 336716.3 | cytochrome P450, subfamily XXVIIB (25-hydroxyvitamin D-1-alpha-hydroxylase), polypeptide 1 | [chemical structure] | [chemical structure] | [chemical structure] | [chemical structure] | [chemical structure] | [chemical structure] | [chemical structure] | 1 |
| 109 | 995211.5 | syndecan 2 (heparan sulfate proteoglycan 1, cell surface-associated, fibroglycan) | [chemical structure] | [chemical structure] | [chemical structure] | [chemical structure] | [chemical structure] | [chemical structure] | [chemical structure] | 1 |
| 110 | 238824.2 | 3-prime-phosphoadenosine 5-prime-phosphosulfate synthase 1 | [chemical structure] | [chemical structure] | [chemical structure] | [chemical structure] | 0.2 | [chemical structure] | [chemical structure] | 1 |
| 111 | 474592.3 | Human leukemia virus receptor 1 (GLVR1) mRNA, complete cds | [chemical structure] | [chemical structure] | [chemical structure] | [chemical structure] | [chemical structure] | [chemical structure] | [chemical structure] | 1 |
| 112 | 431338.2 | regulator of G-protein signaling 16 | [chemical structure] | [chemical structure] | [chemical structure] | [chemical structure] | 0.2 | [chemical structure] | [chemical structure] | 1 |
| 113 | 412631.5 | plectin 1, intermediate filament binding protein, 500 kD | [chemical structure] | [chemical structure] | [chemical structure] | [chemical structure] | 0.5 | [chemical structure] | [chemical structure] | 1 |
| 114 | 350480.6 | Gardner-Rasheed feline sarcoma viral (v-fgr) oncogene homolog | [chemical structure] | [chemical structure] | [chemical structure] | [chemical structure] | [chemical structure] | [chemical structure] | [chemical structure] | 1 |
| 115 | 350521.15 | tumor necrosis factor receptor superfamily, member 10b | [chemical structure] | [chemical structure] | [chemical structure] | [chemical structure] | [chemical structure] | [chemical structure] | [chemical structure] | 1 |
| 116 | 445076.9 | plasminogen activator, urokinase receptor | [chemical structure] | [chemical structure] | [chemical structure] | [chemical structure] | [chemical structure] | [chemical structure] | [chemical structure] | 1 |
| 117 | 995028.4 | fibroblast activation protein, alpha | [chemical structure] | [chemical structure] | [chemical structure] | [chemical structure] | [chemical structure] | [chemical structure] | [chemical structure] | 1 |
| 118 | 245008.4 | phosphodiesterase 8A | [chemical structure] | [chemical structure] | [chemical structure] | [chemical structure] | [chemical structure] | 0.5 | [chemical structure] | 1 |
| 119 | 350895.1 | twist (Drosophila) homolog | [chemical structure] | [chemical structure] | [chemical structure] | [chemical structure] | 0.2 | [chemical structure] | [chemical structure] | 1 |
| 120 | 434265.5 | ribosomal protein S6 kinase, 90 kD, polypeptide 2 | [chemical structure] | 0.5 | [chemical structure] | [chemical structure] | [chemical structure] | [chemical structure] | [chemical structure] | 1 |
| 121 | 427813.14 | fibronectin 1 | [chemical structure] | [chemical structure] | [chemical structure] | 0.2 | 0.2 | 0.2 | [chemical structure] | 1 |
| 122 | 14704.3 | activin A receptor, type II | [chemical structure] | [chemical structure] | [chemical structure] | 0.5 | [chemical structure] | [chemical structure] | [chemical structure] | 1 |
| 123 | 344240.2 | macrophage scavenger receptor 1 | [chemical structure] | [chemical structure] | [chemical structure] | [chemical structure] | [chemical structure] | [chemical structure] | [chemical structure] | 1 |
| 124 | 239694.6 | a disintegrin and metalloproteinase domain 17 (tumor necrosis factor, alph, converting enzyme) | [chemical structure] | [chemical structure] | [chemical structure] | [chemical structure] | 0.3 | [chemical structure] | [chemical structure] | 1 |
| 125 | 255772.2 | activin A receptor, type I | 0.5 | [chemical structure] | [chemical structure] | [chemical structure] | [chemical structure] | [chemical structure] | [chemical structure] | 2 |
| 126 | 232066.3 | integrin, beta 7 | 0.5 | [chemical structure] | [chemical structure] | [chemical structure] | [chemical structure] | [chemical structure] | [chemical structure] | 2 |
| 127 | 246504.1 | activating transcription factor 1 | [chemical structure] | [chemical structure] | [chemical structure] | [chemical structure] | [chemical structure] | [chemical structure] | [chemical structure] | 2 |
| 128 | 986123.22 | vimentin | [chemical structure] | [chemical structure] | [chemical structure] | [chemical structure] | [chemical structure] | [chemical structure] | [chemical structure] | 2 |
| 129 | 898945.14 | kynurenine 3-monooxygenase (kynurenine 3-hydroxylase) | [chemical structure] | [chemical structure] | [chemical structure] | [chemical structure] | [chemical structure] | [chemical structure] | [chemical structure] | 2 |
| 130 | 236208.16 | peptidylglycine alpha-amidating monooxygenase | [chemical structure] | [chemical structure] | [chemical structure] | 0.4 | [chemical structure] | [chemical structure] | [chemical structure] | 2 |
| 131 | 246531.2 | hippocalcin-like 1 | [chemical structure] | [chemical structure] | [chemical structure] | 0.4 | [chemical structure] | [chemical structure] | [chemical structure] | 2 |
| 132 | 238586.2 | matrix metalloproteinase 7 (matrilysin, uterin) | [chemical structure] | [chemical structure] | [chemical structure] | [chemical structure] | [chemical structure] | [chemical structure] | [chemical structure] | 2 |
| 133 | 245532.7 | cyclin-dependent kinase inhibitor 1A (p21, Cip1) | [chemical structure] | [chemical structure] | [chemical structure] | [chemical structure] | [chemical structure] | [chemical structure] | [chemical structure] | 2 |
| 134 | 200972.2 | Human putative cyclin G1 interacting protein mRNA, partial sequence | [chemical structure] | [chemical structure] | [chemical structure] | 0.3 | [chemical structure] | [chemical structure] | [chemical structure] | 2 |
| 135 | 348061.1 | glucan (1,4-alpha-), branching enzyme 1 | [chemical structure] | [chemical structure] | [chemical structure] | [chemical structure] | [chemical structure] | [chemical structure] | [chemical structure] | 2 |
| 136 | 233711.7 | pyruvate dehydrogenase kinase, isoenzyme 4 | [chemical structure] | [chemical structure] | [chemical structure] | [chemical structure] | [chemical structure] | [chemical structure] | [chemical structure] | 2 |
| 137 | 256043.19 | cathepsin L | [chemical structure] | [chemical structure] | 0.4 | [chemical structure] | [chemical structure] | [chemical structure] | [chemical structure] | 2 |
| 138 | 445012.6 | N-deacetylase/N-sulfotransferase (heparan glucosaminyl) 1 | [chemical structure] | [chemical structure] | [chemical structure] | [chemical structure] | [chemical structure] | [chemical structure] | [chemical structure] | 2 |
| 139 | g463906 | syntaxin 4A (placental) | [chemical structure] | [chemical structure] | [chemical structure] | [chemical structure] | [chemical structure] | [chemical structure] | [chemical structure] | 2 |
| 140 | 475621.1 | CD36 antigen (collagen type I receptor, thrombospondin receptor)-like 2 | [chemical structure] | [chemical structure] | [chemical structure] | [chemical structure] | [chemical structure] | [chemical structure] | [chemical structure] | 2 |
| 141 | 216063.17 | Human lysophospholipase homolog (HU-K5) mRNA, complete cds | 0.4 | 0.4 | [chemical structure] | 0.4 | [chemical structure] | [chemical structure] | [chemical structure] | 2 |
| 142 | 1099498.9 | apoliproprotein C-I | 0.5 | [chemical structure] | [chemical structure] | [chemical structure] | [chemical structure] | [chemical structure] | [chemical structure] | 2 |
| 143 | 1099076.1 | fatty acid binding protein 5 (psoriasis-associated) | [chemical structure] | [chemical structure] | [chemical structure] | [chemical structure] | [chemical structure] | [chemical structure] | [chemical structure] | 2 |
| 144 | 902119.3 | CD63 antigen (melanoma 1 antigen) | [chemical structure] | [chemical structure] | [chemical structure] | 0.5 | [chemical structure] | [chemical structure] | [chemical structure] | 2 |
| 145 | g2982500 | neutropathy target esterase | [chemical structure] | 0.5 | [chemical structure] | [chemical structure] | [chemical structure] | [chemical structure] | [chemical structure] | 2 |
| 146 | 1097580.4 | ras homolog gene family, member C | [chemical structure] | [chemical structure] | [chemical structure] | [chemical structure] | [chemical structure] | [chemical structure] | [chemical structure] | 2 |
| 147 | 391851.1 | ferritin, light polypeptide | [chemical structure] | [chemical structure] | [chemical structure] | [chemical structure] | [chemical structure] | [chemical structure] | [chemical structure] | 2 |
| 148 | 13105.9 | lectin, galactoside-binding, soluble, 3 (galectin 3) | [chemical structure] | [chemical structure] | [chemical structure] | 0.5 | [chemical structure] | [chemical structure] | [chemical structure] | 2 |
| 149 | 356248.4 | inositol phosphate 5′-phosphatase 2 (synaptojanin 2) | [chemical structure] | [chemical structure] | [chemical structure] | 0.3 | [chemical structure] | [chemical structure] | [chemical structure] | 2 |
| 150 | 331045.1 | phosphodiesterase 3B, cGMP-inhibited | [chemical structure] | [chemical structure] | [chemical structure] | [chemical structure] | [chemical structure] | [chemical structure] | [chemical structure] | 2 |
| 151 | 42480.3 | guanine nucleotide-releasing factor 2 (specific for crk proto-oncogene) | [chemical structure] | [chemical structure] | [chemical structure] | [chemical structure] | [chemical structure] | 0.5 | [chemical structure] | 2 |
| 152 | 245099.8 | target of myb1 (chicken) homolog | [chemical structure] | [chemical structure] | [chemical structure] | [chemical structure] | [chemical structure] | [chemical structure] | [chemical structure] | 2 |
| 153 | 245481.2 | ciliary neurotrophic factor receptor | [chemical structure] | [chemical structure] | [chemical structure] | [chemical structure] | [chemical structure] | [chemical structure] | [chemical structure] | 2 |
| 154 | 225021.4 | Burkitt lymphoma receptor 1, GTP-binding protein | [chemical structure] | [chemical structure] | [chemical structure] | [chemical structure] | [chemical structure] | [chemical structure] | [chemical structure] | 4 |
| 155 | 451767.28 | tissue inhibitor of metalloproteinase 3 (Sorsby fundus dystrophy, pseudoinflammatory) | 0.5 | 0.5 | [chemical structure] | [chemical structure] | [chemical structure] | [chemical structure] | [chemical structure] | 4 |
| 156 | 902142.11 | Homo sapiens leucocyte immunoglubulin-like receptor-5 (LIR-5) mRNA, complete cds | 0.5 | [chemical structure] | [chemical structure] | [chemical structure] | [chemical structure] | [chemical structure] | [chemical structure] | 4 |
| 157 | 291095.5 | cytochrome P450, subfamily I (dioxin-inducible), polypeptide 1 (glaucoma 3, primary infantile) | [chemical structure] | [chemical structure] | [chemical structure] | [chemical structure] | [chemical structure] | [chemical structure] | [chemical structure] | 4 |
| 158 | 332919.4 | H. sapiens mRNA for cytokine inducible nuclear protein | [chemical structure] | [chemical structure] | [chemical structure] | [chemical structure] [chemical structure] | [chemical structure] | [chemical structure] | 4 | |
| 159 | 387130.26 | choline kinase-like | [chemical structure] | [chemical structure] | [chemical structure] | [chemical structure] | [chemical structure] | [chemical structure] | [chemical structure] | 4 |
| 160 | 410580.13 | plasminogen activator inhibitor, type I | [chemical structure] | [chemical structure] | [chemical structure] | [chemical structure] | [chemical structure] | [chemical structure] | [chemical structure] | 4 |
| 161 | 251715.1 | early growth response 1 | [chemical structure] | [chemical structure] | [chemical structure] | [chemical structure] | [chemical structure] | [chemical structure] | [chemical structure] | 4 |
| 162 | 1799017F6 | neuregulin 1 | [chemical structure] | [chemical structure] | [chemical structure] | [chemical structure] | [chemical structure] | [chemical structure] | [chemical structure] | 4 |
| 163 | 348891.1 | BCL2/adenovirus E1B 19 kD-interacting protein 3-like | [chemical structure] | [chemical structure] | [chemical structure] | [chemical structure] | [chemical structure] | [chemical structure] | [chemical structure] | 4 |
| 164 | 903956.15 | numb (Drosophila) homolog | [chemical structure] | [chemical structure] | [chemical structure] | [chemical structure] | 0.5 | [chemical structure] | [chemical structure] | 4 |
| 165 | 235184.1 | guanine nucleotide binding protein 11 | [chemical structure] | [chemical structure] | [chemical structure] | [chemical structure] | [chemical structure] | [chemical structure] | [chemical structure] | 4 |
| 166 | 330948.3 | solute carrier family 9 (sodium/hydrogen exchanger), isoform 1 | [chemical structure] | [chemical structure] | [chemical structure] | [chemical structure] | [chemical structure] | [chemical structure] | [chemical structure] | 4 |
| 167 | 994057.1 | thrombospondin 1 | [chemical structure] | [chemical structure] | 0.5 | [chemical structure] | [chemical structure] | [chemical structure] | [chemical structure] | 4 |
| 168 | 197301.4 | phosphoprotein regulated by mitogenic pathways | [chemical structure] | [chemical structure] | 0.3 | [chemical structure] | [chemical structure] | [chemical structure] | [chemical structure] | 4 |
| 169 | 476016.17 | nuclear factor of kappa light polypeptide gene enhancer in B-cells inhibitor, alphs | [chemical structure] | [chemical structure] | [chemical structure] | [chemical structure] | [chemical structure] | [chemical structure] | [chemical structure] | 4 |
| 170 | 1098409.1 | early growth response 2 (Krox-20 (Drosophila) homolog) | 0.4 | 0.5 | 0.4 | [chemical structure] | [chemical structure] | [chemical structure] | [chemical structure] | 4 |
| 197 | 997377.1 | ribonuclease, RNase A family, 3 (eosinophil cationic protein) | [chemical structure] | [chemical structure] | [chemical structure] | [chemical structure] | [chemical structure] | [chemical structure] | 0.2 | 3 |
| 198 | 42869.3 | cathepsin G | [chemical structure] | [chemical structure] | [chemical structure] | [chemical structure] | [chemical structure] | [chemical structure] | 0.1 | 3 |
| 199 | 248306.1 | carbonic anhydrose II | [chemical structure] | [chemical structure] | [chemical structure] | [chemical structure] | [chemical structure] | [chemical structure] | 0.1 | 3 |
| 200 | 247220.15 | thymidylate synthetase | [chemical structure] | [chemical structure] | [chemical structure] | [chemical structure] | [chemical structure] | 0.2 | 0.2 | 5 |
| 201 | 26662.3 | centromere protein F (350/400 kD, motosin) | [chemical structure] | [chemical structure] | [chemical structure] | [chemical structure] | [chemical structure] | [chemical structure] | 0.2 | 5 |
| 202 | 977509.3 | v-myb avian myeloblastosis viral oncogene homolog-like 2 | [chemical structure] | [chemical structure] | [chemical structure] | [chemical structure] | [chemical structure] | 0.2 | 0.2 | 5 |
| 203 | 221961.2 | myeloid cell nuclear differentiation antigen | [chemical structure] | [chemical structure] | [chemical structure] | [chemical structure] | [chemical structure] | [chemical structure] | 0.1 | 5 |
| 204 | 246824.1 | ribonuclease, RNase A family, 2 (liver, eosinophil-derived neurotoxin) | [chemical structure] | [chemical structure] | [chemical structure] | [chemical structure] | [chemical structure] | [chemical structure] | 0.2 | 5 |
| 205 | 407557.2 | cyclin-dependent kinase inhibitor 2C (p18, inhibits CDK4) | [chemical structure] | [chemical structure] | [chemical structure] | [chemical structure] | [chemical structure] | [chemical structure] | 0.2 | 5 |
| 206 | 372981.2 | Homo sapiens ZW10 interactor Zwint mRNA, complete cds | [chemical structure] | [chemical structure] | [chemical structure] | [chemical structure] | [chemical structure] | [chemical structure] | 0.2 | 5 |
| 207 | 201409.6 | Fc fragment of IgG, high affinity Ia, receptor for (CD64) | [chemical structure] | [chemical structure] | [chemical structure] | [chemical structure] | [chemical structure] | [chemical structure] | 0.2 | 5 |
| 208 | 331025.1 | Homo sapiens mitotic centromere-associated kinesin mRNA, complete cds | [chemical structure] | [chemical structure] | [chemical structure] | [chemical structure] | [chemical structure] | [chemical structure] | 0.2 | 5 |
| 209 | 247515.1 | elastase 2, neutrophil | [chemical structure] | [chemical structure] | [chemical structure] | [chemical structure] | [chemical structure] | [chemical structure] | [chemical structure] | 5 |
| 210 | 199471.2 | MAD2 (mitotic arrest deficient, yeast, homolog)-like 1 | [chemical structure] | [chemical structure] | [chemical structure] | [chemical structure] | [chemical structure] | [chemical structure] | [chemical structure] | 5 |
| 211 | 2916753 | high-mobility group (nonhistone chromosomal) protein 2 | [chemical structure] | [chemical structure] | [chemical structure] | [chemical structure] | [chemical structure] | [chemical structure] | 0.2 | 5 |
| 212 | 343899.2 | hyaluronan-mediated motility receptor (RHAMM) | [chemical structure] | [chemical structure] | [chemical structure] | [chemical structure] | [chemical structure] | [chemical structure] | 0.2 | 5 |
| 213 | 335775.2 | lamin B1 | [chemical structure] | [chemical structure] | [chemical structure] | [chemical structure] | [chemical structure] | [chemical structure] | 0.2 | 5 |
| 214 | 232714.5 | ESTs | [chemical structure] | [chemical structure] | [chemical structure] | [chemical structure] | [chemical structure] | [chemical structure] | [chemical structure] | 5 |
| 215 | 305039.4 | ESTs | [chemical structure] | [chemical structure] | [chemical structure] | [chemical structure] | [chemical structure] | [chemical structure] | [chemical structure] | 5 |
| 216 | 233603.2 | ESTs | [chemical structure] | [chemical structure] | [chemical structure] | [chemical structure] | [chemical structure] | [chemical structure] | [chemical structure] | 5 |
| 217 | 330930.1 | ESTs | [chemical structure] | [chemical structure] | [chemical structure] | [chemical structure] | [chemical structure] | [chemical structure] [chemical structure] | 5 | |
| 218 | 247289.1 | Human clone 23815 mRNA sequence | [chemical structure] | [chemical structure] | [chemical structure] | [chemical structure] | [chemical structure] | [chemical structure] | [chemical structure] | 5 |
| 219 | 331033.1 | KIAA0008 gene product | [chemical structure] | [chemical structure] | [chemical structure] | 0.5 | [chemical structure] | [chemical structure] | [chemical structure] | 5 |
| 220 | 1098766.1 | ESTs | [chemical structure] | [chemical structure] | [chemical structure] | [chemical structure] | [chemical structure] | [chemical structure] | 0.3 | 5 |
| 221 | 245632.3 | ESTs | [chemical structure] | [chemical structure] | [chemical structure] | [chemical structure] | [chemical structure] | [chemical structure] | [chemical structure] | 5 |
| 222 | 333461.2 | Human mRNA for KIAA0074 gene, partial cd | [chemical structure] | [chemical structure] | [chemical structure] | [chemical structure] | [chemical structure] | [chemical structure] | 5 | |
| 223 | 347876.6 | minichromosome maintenance deficient (S. cerevisiae) 4 | [chemical structure] | [chemical structure] | [chemical structure] | [chemical structure] | [chemical structure] | [chemical structure] | [chemical structure] | 5 |
| 224 | 413842.1 | Human ECRP gene for eosinophil cationic related protein | [chemical structure] | [chemical structure] | [chemical structure] | [chemical structure] | [chemical structure] | [chemical structure] | [chemical structure] | 5 |
| 225 | 235867.2 | polo (Drosophia)-like kinase | [chemical structure] | [chemical structure] | [chemical structure] | [chemical structure] | [chemical structure] | [chemical structure] | [chemical structure] | 5 |
| 226 | 428665 | ribonucleotide reductase M1 polypeptide | [chemical structure] | [chemical structure] | [chemical structure] | [chemical structure] | [chemical structure] | [chemical structure] | [chemical structure] | 5 |
| 227 | 2234.3 | Homo sapiens histone H2A.F/Z variant (H2AV) mRNA, complete cds | [chemical structure] | [chemical structure] | [chemical structure] | [chemical structure] | [chemical structure] | [chemical structure] | [chemical structure] | 5 |
| 228 | 1000139.13 | insulin-like growth factor binding protein 7 | [chemical structure] | [chemical structure] | [chemical structure] | [chemical structure] | [chemical structure] | [chemical structure] | [chemical structure] | 5 |
| 229 | 998534.1 | growth factor independent 1 | [chemical structure] | [chemical structure] | [chemical structure] | [chemical structure] | [chemical structure] | [chemical structure] | [chemical structure] | 5 |
| 230 | 372377.6 | phosphorylase, glycogen; liver (Hers disease, glycogen storage disease type VI) | [chemical structure] | [chemical structure] | [chemical structure] | [chemical structure] | [chemical structure] | [chemical structure] | [chemical structure] | 5 |
| 231 | 1101412.4 | trophinin-assisting protein (tastin) | [chemical structure] | [chemical structure] | [chemical structure] | [chemical structure] | [chemical structure] | [chemical structure] | [chemical structure] | 5 |
| 232 | 261567.5 | CDC28 protein kinase 2 | [chemical structure] | [chemical structure] | [chemical structure] | [chemical structure] | [chemical structure] | [chemical structure] | [chemical structure] | 5 |
| 233 | 232713.2 | uracil-DNA glycosylase | [chemical structure] | [chemical structure] | [chemical structure] | [chemical structure] | [chemical structure] | [chemical structure] | [chemical structure] | 5 |
| 234 | 214335.13 | Homo sapiens E2F-related transcription factor (DP-1) mRNA, complete cds | [chemical structure] | [chemical structure] | [chemical structure] | [chemical structure] | [chemical structure] | [chemical structure] | [chemical structure] | 5 |
| 235 | 331022.33 | dihydropyrimidine dehydrogenase | [chemical structure] | [chemical structure] | [chemical structure] | [chemical structure] | [chemical structure] | [chemical structure] | [chemical structure] | 5 |
| 236 | 332259.3 | retinoblastoma-like 1 (p107) | [chemical structure] | [chemical structure] | [chemical structure] | [chemical structure] | [chemical structure] | [chemical structure] | [chemical structure] | 5 |
| 237 | 253570.8 | forkhead (Drosophila)-like 16 | [chemical structure] | [chemical structure] | [chemical structure] | [chemical structure] | [chemical structure] | [chemical structure] | [chemical structure] | 5 |
| 238 | 995529.5 | cell division cycle 2, G1 to S and G2 to M | [chemical structure] | [chemical structure] | [chemical structure] | [chemical structure] | [chemical structure] | [chemical structure] | [chemical structure] | 5 |
| 239 | 474435.16 | Human MAC30 mRNA, 3′ end | [chemical structure] | [chemical structure] | [chemical structure] | [chemical structure] | [chemical structure] | [chemical structure] | [chemical structure] | 5 |
| 240 | 994861.1 | Human chondroitin sulfate proteoglycan core protein mRNA, 3′ end | [chemical structure] | [chemical structure] | [chemical structure] | [chemical structure] | [chemical structure] | [chemical structure] | [chemical structure] | 5 |
| 241 | g545708 | natural kill cell group 7 sequence | [chemical structure] | [chemical structure] | [chemical structure] | [chemical structure] | [chemical structure] | [chemical structure] | [chemical structure] | 5 |
| 242 | 347965.2 | CD39 antigen | [chemical structure] | [chemical structure] | [chemical structure] | [chemical structure] | [chemical structure] | [chemical structure] | [chemical structure] | 5 |
| 243 | 202361.1 | small nuclear ribonucleoprotein polypeptide A | [chemical structure] | [chemical structure] | [chemical structure] | [chemical structure] | [chemical structure] | [chemical structure] | [chemical structure] | 5 |
| 244 | 369950.12 | DNA-damage-inducible transcript 1 | [chemical structure] | [chemical structure] | [chemical structure] | [chemical structure] | [chemical structure] | [chemical structure] | 0.2 | 5 |
| 245 | 331403.8 | minichromosome maintenance deficient (S. cerevisiae) 5 (cell division cycle 46) | [chemical structure] | [chemical structure] | [chemical structure] | [chemical structure] | [chemical structure] | [chemical structure] | [chemical structure] | 5 |
| 246 | 233889.3 | CDC28 proeint kinase 1 | [chemical structure] | [chemical structure] | [chemical structure] | [chemical structure] | [chemical structure] | [chemical structure] | [chemical structure] | 5 |
| 247 | 21148.4 | nucleobindin 2 | [chemical structure] | [chemical structure] | [chemical structure] | [chemical structure] | [chemical structure] | [chemical structure] | 0.2 | 5 |
| 248 | 976749.1 | replication factor C (activator 1) 4 (37 kD) | [chemical structure] | [chemical structure] | [chemical structure] | [chemical structure] | [chemical structure] | [chemical structure] | [chemical structure] | 5 |
| 249 | 252719.12 | Human beta 3-endonexin mRNA, long form and short form, complete cds | [chemical structure] | [chemical structure] | [chemical structure] | [chemical structure] | [chemical structure] | [chemical structure] | [chemical structure] | 5 |
| 250 | g6063478 | G/T mismatch-binding protein | [chemical structure] | [chemical structure] | [chemical structure] | [chemical structure] | [chemical structure] | [chemical structure] | [chemical structure] | 5 |
| 251 | 347314.3 | serine/threonine kinase 15 | [chemical structure] | [chemical structure] | [chemical structure] | [chemical structure] | [chemical structure] | [chemical structure] | [chemical structure] | 5 |
| 252 | g3213196 | serine/threonine kinase 15 | [chemical structure] | [chemical structure] | [chemical structure] | [chemical structure] | [chemical structure] | [chemical structure] | [chemical structure] | 5 |
| 253 | 245184.3 | transforming growth factor, beta-induced 68 kD | [chemical structure] | [chemical structure] | [chemical structure] | [chemical structure] | [chemical structure] | [chemical structure] | [chemical structure] | 5 |
| 254 | 243574.11 | cysteine-rich protein 1 (intestinal) | [chemical structure] | [chemical structure] | [chemical structure] | [chemical structure] | [chemical structure] | [chemical structure] | [chemical structure] | 5 |
| 255 | 474826.6 | nidogen (enactin) | [chemical structure] | [chemical structure] | [chemical structure] | [chemical structure] | [chemical structure] | 0.3 | 0.2 | 5 |
| 256 | 997347.6 | feline sarcoma viral (v-fes)/Fujinami avian sarcoma (PRCII) viral (v-fps) oncogene homolog | [chemical structure] | [chemical structure] | [chemical structure] | [chemical structure] | [chemical structure] | [chemical structure] | [chemical structure] | 5 |
| 257 | 222049.1 | H. sapiens mRNA for glutamine cyclotransferase | [chemical structure] | [chemical structure] | [chemical structure] | [chemical structure] | [chemical structure] | 0.4 | [chemical structure] | 5 |
| 258 | 9902659.8 | small nuclear ribonucleoprotein polypeptide G | [chemical structure] | [chemical structure] | [chemical structure] | [chemical structure] | [chemical structure] | [chemical structure] | [chemical structure] | 5 |
| 259 | 2508261 | interferon, gamma-inducible protein 16 | [chemical structure] | [chemical structure] | [chemical structure] | [chemical structure] | [chemical structure] | [chemical structure] | [chemical structure] | 5 |
| 260 | 232945.12 | RAD54 (S. cerevisiae)-like | [chemical structure] | [chemical structure] | [chemical structure] | [chemical structure] | [chemical structure] | [chemical structure] | [chemical structure] | 5 |
| 261 | 445101.8 | proliferating cell nuclear antigen | [chemical structure] | [chemical structure] | [chemical structure] | [chemical structure] | [chemical structure] | [chemical structure] | [chemical structure] | 5 |
| 262 | 255750.1 | metallothionein 3 (growth inhibitory factor (neurotrophic)) | [chemical structure] | [chemical structure] | [chemical structure] | [chemical structure] | [chemical structure] | [chemical structure] | [chemical structure] | 5 |
| 263 | 988231.7 | interferon-induced protein 17 | [chemical structure] | [chemical structure] | [chemical structure] | [chemical structure] | [chemical structure] | [chemical structure] | [chemical structure] | 5 |
| 264 | 444902.6 | interferon-inducible | [chemical structure] | [chemical structure] | [chemical structure] | [chemical structure] | [chemical structure] | [chemical structure] | [chemical structure] | 5 |
| 265 | 407546.8 | calreticulin | [chemical structure] | [chemical structure] | [chemical structure] | [chemical structure] | [chemical structure] | [chemical structure] | [chemical structure] | 5 |
| 266 | 346511.4 | 2′-5′oligoadenylate synthetase 2 | [chemical structure] | [chemical structure] | [chemical structure] | [chemical structure] | [chemical structure] | [chemical structure] | [chemical structure] | 5 |
| 267 | 346411.5 | 2′-5′oligoadenylate synthetase 2 | [chemical structure] | [chemical structure] | [chemical structure] | [chemical structure] | [chemical structure] | [chemical structure] | [chemical structure] | 5 |
| 268 | 1098141.1 | breast cancer 1, early onset | [chemical structure] | [chemical structure] | [chemical structure] | [chemical structure] | [chemical structure] | [chemical structure] | [chemical structure] | 5 |
| 269 | 238089.2 | exonuclease 1 | [chemical structure] | [chemical structure] | [chemical structure] | [chemical structure] | [chemical structure] | [chemical structure] | [chemical structure] | 5 |
| 270 | 1100105.3 | CD74 antigen | [chemical structure] | [chemical structure] | [chemical structure] | [chemical structure] | [chemical structure] | [chemical structure] | [chemical structure] | 6 |
| 271 | 474729.2 | calponin 2 | [chemical structure] | [chemical structure] | [chemical structure] | [chemical structure] | [chemical structure] | [chemical structure] | [chemical structure] | 6 |
| 272 | 36300.3 | complement component 2 | [chemical structure] | [chemical structure] | [chemical structure] | [chemical structure] | [chemical structure] | [chemical structure] | [chemical structure] | 6 |
| 273 | 395096.3 | minichromosome maintenance deficient (S. cerevisiae) 2 (mitotine) | [chemical structure] | [chemical structure] | [chemical structure] | [chemical structure] | [chemical structure] | 0.2 | [chemical structure] | 7 |
| 274 | 374086.1 | high-mobility group (nonhistone chromosomal) protein 1 | [chemical structure] | [chemical structure] | [chemical structure] | [chemical structure] | [chemical structure] | [chemical structure] | [chemical structure] | 7 |
| 275 | 44495.4 | small nuclear ribonucleoprotein polypeptide F | [chemical structure] | [chemical structure] | [chemical structure] | [chemical structure] | [chemical structure] | 0.5 | [chemical structure] | 7 |
| 276 | 474876.2 | Human mRNA for Sm protein F | [chemical structure] | [chemical structure] | [chemical structure] | [chemical structure] | [chemical structure] | [chemical structure] | [chemical structure] | 7 |

[0192] TABLE 2

| SEQ ID | | | | |
|---|---|---|---|---|
| NO | Incyte ID | Clone ID | Start | Stop |
| 1 | 440295.1 | 3034487 | 2203 | 3330 |
| 2 | g34387 | 79576 | 17 | 1395 |
| 3 | 247178.2 | 567292 | 3432 | 4661 |
| 4 | 567938 | 567938 | 669 | 1472 |
| 5 | 351122.2 | 682741 | 682 | 1151 |
| 6 | 481379.9 | 1219315 | 3730 | 4136 |
| 7 | 215391.7 | 1269046 | 861 | 1902 |
| 8 | 243812.1 | 1321761 | 698 | 1663 |
| 9 | 1085755.1 | 1376121 | 650 | 1291 |
| 10 | 347809.3 | 1516886 | 3615 | 4644 |
| 11 | 331734.4 | 1595081 | 334 | 876 |
| 12 | 116840.38 | 1606119 | 847 | 1284 |
| 13 | 903565.11 | 1672574 | 4016 | 4325 |
| 14 | 903565.8 | 1672574 | 1242 | 1787 |
| 15 | 474310.13 | 1672744 | 1281 | 3844 |
| 16 | 413006.13 | 1732479 | 1143 | 1904 |
| 17 | 76460.2 | 1749883 | 350 | 831 |
| 18 | 474374.4 | 2679117 | 1030 | 2542 |
| 19 | 427792.8 | 2806166 | 611 | 1994 |
| 20 | 364482.3 | 3178719 | 1331 | 1922 |
| 21 | 978487.1 | 3178719 | 54 | 526 |
| 22 | 410626.2 | 3602501 | 1153 | 1796 |
| 23 | 234480.6 | 1238577 | 298 | 1045 |
| 24 | 253542.2 | 1734561 | 1606 | 2355 |
| 25 | 234202.24 | 1995380 | 50 | 901 |
| 26 | 253946.4 | 2172334 | 1098 | 2397 |
| 27 | 348801.1 | 2203834 | 15 | 663 |
| 28 | 980611.1 | 2213735 | 1431 | 2249 |
| 29 | 283885.8 | 2415989 | 918 | 1576 |
| 30 | 348196.33 | 2852561 | 1095 | 1848 |
| 31 | 256009.4 | 3068454 | 4496 | 4936 |
| 32 | 481594.12 | 3211396 | 649 | 1098 |
| 33 | 978788.1 | 3211396 | 562 | 678 |
| 34 | 335171.1 | 3229778 | 5149 | 5670 |
| 35 | 998433.2 | 63038 | 2 | 1032 |
| 36 | 221928.9 | 674714 | 1199 | 1386 |
| 37 | 331291.3 | 1579487 | 3345 | 3833 |
| 38 | 233331.3 | 1712888 | 2259 | 2939 |
| 39 | 474682.2 | 1969044 | 1006 | 1509 |
| 40 | 3161.7 | 1484773 | 270 | 603 |
| 41 | 984248.1 | 1516047 | 968 | 1760 |
| 42 | 196590.2 | 1607510 | 723 | 1118 |
| 43 | 255109.1 | 1607510 | 304 | 429 |
| 44 | 238622.1 | 1669780 | 27 | 957 |
| 45 | 334385.3 | 1890138 | 6050 | 6479 |
| 46 | 998997.1 | 1640161 | 1104 | 1496 |
| 47 | 200578.1 | 1397926 | 1138 | 2288 |
| 48 | 208134.1 | 2293931 | 2596 | 2746 |
| 49 | 153659.2 | 519653 | 1355 | 1884 |
| 50 | 241930.15 | 1512213 | 1017 | 1540 |
| 51 | 413466.5 | 1985104 | 760 | 1861 |
| 52 | 3249239 | 3249239 | 740 | 2957 |
| 53 | 337518.18 | 3506985 | 151 | 500 |
| 54 | g3116213 | 2170638 | 194 | 1738 |
| 55 | g5912216 | 2170638 | 466 | 2010 |
| 56 | 992917.1 | 27775 | 386 | 910 |
| 57 | 411424.12 | 126888 | 88 | 599 |
| 58 | 995600.17 | 237730 | 799 | 1151 |
| 59 | 441292.7 | 1624024 | 1208 | 2738 |
| 60 | 42176.5 | 1650238 | 89 | 2297 |
| 61 | 234537.3 | 1718651 | 3061 | 3639 |
| 62 | 470468.21 | 1806435 | 800 | 1521 |
| 63 | 240120.3 | 1862257 | 472 | 2312 |
| 64 | 28779.3 | 2220923 | 8 | 785 |
| 65 | 238627.2 | 2555673 | 145 | 855 |
| 66 | 254107.1 | 2394637 | 3297 | 4186 |
| 67 | 330908.2 | 2987878 | 2395 | 3815 |
| 68 | g687589 | 1403041 | 170 | 1592 |
| 69 | 197975.11 | 1560143 | 2995 | 4347 |
| 70 | 227928.2 | 1719657 | 1717 | 2098 |
| 71 | 258785.7 | 1738168 | 3345 | 3738 |
| 72 | 977757.3 | 1830303 | 4598 | 7208 |
| 73 | 232773.2 | 1958631 | 2317 | 2963 |
| 74 | g6634024 | 2378601 | 697 | 1808 |
| 75 | g4589571 | 2902846 | 3036 | 3495 |
| 76 | 334370.3 | 3335055 | 1195 | 2483 |
| 77 | 980461.1 | 4003857 | 293 | 702 |
| 78 | 422969.4 | 1369536 | 3174 | 4219 |
| 79 | 244150.4 | 1429306 | 1803 | 5218 |
| 80 | 410257.11 | 1965978 | 2763 | 3546 |
| 81 | 28253.3 | 75549 | 425 | 661 |
| 82 | g31670 | 155892 | 1884 | 2388 |
| 83 | 977552.1 | 155904 | 993 | 1501 |
| 84 | 977552.2 | 155904 | 281 | 789 |
| 85 | 347829.6 | 185448 | 334 | 2046 |
| 86 | 251776.11 | 418731 | 2766 | 3414 |
| 87 | 343674.9 | 450618 | 919 | 1425 |
| 88 | 479136.1 | 885297 | 2474 | 3905 |
| 89 | 1078147.1 | 1000508 | 1289 | 2523 |
| 90 | 474275.1 | 1297562 | 4431 | 5815 |
| 91 | g403532 | 1320658 | 1213 | 2771 |
| 92 | 242114.16 | 1361963 | 2792 | 4530 |
| 93 | 445186.7 | 1375107 | 243 | 1602 |
| 94 | 474496.2 | 1401002 | 1855 | 2387 |
| 95 | 257114.7 | 1424573 | 867 | 1703 |
| 96 | 984005.1 | 1446475 | 68 | 809 |
| 97 | 977667.1 | 1447909 | 1146 | 1705 |
| 98 | 996862.4 | 1449337 | 50 | 660 |
| 99 | 364940.19 | 1479437 | 2522 | 5308 |
| 100 | 1041140.4 | 2220025 | 448 | 2428 |
| 101 | 408246.2 | 1595756 | 890 | 1796 |
| 102 | 902740.4 | 1670773 | 373 | 845 |
| 103 | 475486.9 | 1694039 | 483 | 1534 |
| 104 | 233778.9 | 1695477 | 970 | 1500 |
| 105 | 350392.3 | 1719058 | 2417 | 4573 |
| 106 | 458045.4 | 1720114 | 2424 | 4196 |
| 107 | 471362.17 | 1720149 | 286 | 1089 |
| 108 | 336716.3 | 1749727 | 1431 | 2412 |
| 109 | 995211.5 | 1782172 | 1192 | 3936 |
| 110 | 238824.2 | 1841989 | 1082 | 2360 |
| 111 | 474592.3 | 1846463 | 2393 | 3281 |
| 112 | 431338.2 | 1890243 | 876 | 2359 |
| 113 | 412631.5 | 1907232 | 12440 | 12947 |
| 114 | 350480.6 | 1975575 | 1928 | 2274 |
| 115 | 350521.15 | 2078364 | 1075 | 1890 |
| 116 | 445076.9 | 2449986 | 356 | 1578 |
| 117 | 995028.4 | 2483605 | 132 | 606 |
| 118 | 245008.4 | 2900572 | 2225 | 3836 |
| 119 | 350895.1 | 2952864 | 440 | 1439 |
| 120 | 434265.5 | 3421442 | 740 | 1203 |
| 121 | 427813.14 | 3553729 | 6501 | 7091 |
| 122 | 14704.3 | 3742428 | 1000 | 2154 |
| 123 | 344240.2 | 3943651 | 2050 | 2530 |
| 124 | 239694.6 | 4144156 | 2287 | 3032 |
| 125 | 255772.2 | 433573 | 1321 | 2758 |
| 126 | 232066.3 | 514726 | 2248 | 2778 |
| 127 | 246504.1 | 570512 | 750 | 2361 |
| 128 | 986123.22 | 1522716 | 1264 | 1904 |
| 129 | 898945.14 | 1525829 | 830 | 1628 |
| 130 | 236208.16 | 1682642 | 2775 | 3010 |
| 131 | 246531.2 | 1692164 | 1374 | 1602 |
| 132 | 238586.2 | 1699587 | 427 | 910 |
| 133 | 245532.7 | 1804548 | 1196 | 1992 |
| 134 | 200972.2 | 1850135 | 1308 | 2138 |
| 135 | 348061.1 | 1867652 | 687 | 2825 |
| 136 | 233711.7 | 1902929 | 1146 | 2151 |
| 137 | 256043.19 | 1910469 | 1137 | 1625 |
| 138 | 445012.6 | 1911016 | 6908 | 7424 |
| 139 | g463906 | 1959969 | 29 | 523 |
| 140 | 475621.1 | 1967160 | 1459 | 1932 |
| 141 | 216063.17 | 2174920 | 381 | 1030 |
| 142 | 1099498.9 | 2369312 | 463 | 601 |
| 143 | 1099076.1 | 2537805 | 299 | 664 |
| 144 | 902119.3 | 2594308 | 1 | 836 |
| 145 | g2982500 | 2720693 | 3244 | 4316 |
| 146 | 1097580.4 | 2733928 | 126 | 1118 |
| 147 | 391851.1 | 2868138 | 490 | 851 |
| 148 | 13105.9 | 2921194 | 462 | 1362 |
| 149 | 356248.4 | 2967860 | 1184 | 5905 |
| 150 | 331045.1 | 3001809 | 2899 | 4165 |
| 151 | 482480.3 | 3003077 | 2356 | 2814 |
| 152 | 245099.8 | 3119252 | 1681 | 2281 |
| 153 | 245481.2 | 3606947 | 243 | 1980 |
| 154 | 225021.4 | 146667 | 1489 | 2773 |
| 155 | 451767.28 | 418041 | 66 | 864 |
| 156 | 902142.11 | 518094 | 1155 | 1925 |
| 157 | 291095.5 | 719318 | 4551 | 5099 |
| 158 | 332919.4 | 924319 | 781 | 1262 |
| 159 | 387130.26 | 1439677 | 133 | 3079 |
| 160 | 410580.13 | 1445767 | 645 | 2172 |
| 161 | 251715.1 | 1705208 | 1702 | 2383 |
| 162 | 1799017F6 | 1799017 | 1 | 459 |
| 163 | 348891.1 | 1877829 | 777 | 1288 |
| 164 | 903956.15 | 1879023 | 1328 | 3314 |
| 165 | 235184.1 | 1988432 | 660 | 979 |
| 166 | 330948.3 | 2054252 | 3800 | 4487 |
| 167 | 994057.1 | 2055534 | 4841 | 5856 |
| 168 | 197301.4 | 2591814 | 937 | 3287 |
| 169 | 476016.17 | 3142624 | 419 | 1641 |
| 170 | 1098409.1 | 3603037 | 1338 | 2945 |
| 171 | 202023.6 | 160822 | 2991 | 4412 |
| 172 | 350423.5 | 1624459 | 56 | 1711 |
| 173 | 1100023.1 | 2895245 | 512 | 2019 |
| 174 | 414196.8 | 1222317 | 1 | 476 |
| 175 | 331106.6 | 1518328 | 1675 | 2011 |
| 176 | g180670 | 1558081 | 1074 | 2596 |
| 177 | 236574.12 | 1559730 | 2628 | 3663 |
| 178 | 1000033.6 | 1600726 | 1229 | 4571 |
| 179 | 37567.22 | 1672930 | 185 | 829 |
| 180 | 995610.1 | 1673876 | 1688 | 2958 |
| 181 | 1702374 | 1702374 | 1038 | 3139 |
| 182 | 427883.47 | 1881243 | −14 | 435 |
| 183 | 93687.6 | 1907952 | 1259 | 1638 |
| 184 | 414100.4 | 1931275 | 323 | 1871 |
| 185 | 235148.4 | 1987127 | 199 | 873 |
| 186 | 430039.3 | 1988710 | 932 | 1388 |
| 187 | 348110.2 | 2158373 | 2064 | 2281 |
| 188 | 1098815.7 | 2831248 | 393 | 924 |
| 189 | 474491.18 | 3747901 | 190 | 1319 |
| 190 | 474491.19 | 3747901 | 267 | 1396 |
| 191 | 419031.5 | 1988019 | 1627 | 2079 |
| 192 | 399658.1 | 3967402 | 559 | 1697 |
| 193 | 474913.3 | 3138128 | 3685 | 4570 |
| 194 | 199898.3 | 1217764 | 271 | 932 |
| 195 | 253550.14 | 1447903 | 441 | 2458 |
| 196 | 331597.2 | 1975944 | 3277 | 4284 |
| 197 | 997377.1 | 1526665 | 256 | 788 |
| 198 | 42869.3 | 2016960 | 162 | 835 |
| 199 | 248306.1 | 2474163 | 198 | 1710 |
| 200 | 247220.15 | 39817 | 846 | 1550 |
| 201 | 26662.3 | 485111 | 7807 | 10242 |
| 202 | 977509.3 | 494905 | 166 | 2605 |
| 203 | 221961.2 | 633460 | 945 | 1672 |
| 204 | 246824.1 | 1488852 | 319 | 789 |
| 205 | 407557.2 | 1501556 | 1391 | 2055 |
| 206 | 372981.2 | 1576329 | 551 | 906 |
| 207 | 201409.6 | 1622987 | 791 | 1342 |
| 208 | 331025.1 | 2242674 | 1364 | 2791 |
| 209 | 247515.1 | 2399253 | 606 | 1044 |
| 210 | 199471.2 | 2414624 | 125 | 1464 |
| 211 | 2916753 | 2916753 | 114 | 1109 |
| 212 | 343899.2 | 3622417 | 97 | 897 |
| 213 | 335775.2 | 3771476 | 1324 | 2846 |
| 214 | 232714.5 | 277897 | 479 | 649 |
| 215 | 305039.4 | 522991 | 1009 | 1391 |
| 216 | 233603.2 | 1604056 | 1 | 190 |
| 217 | 330930.1 | 1740384 | 6110 | 6515 |
| 218 | 247289.1 | 1901271 | 2050 | 2558 |
| 219 | 331033.1 | 1970111 | 1079 | 2827 |
| 220 | 1098766.1 | 2113618 | 939 | 1345 |
| 221 | 245632.3 | 2396287 | 2506 | 2827 |
| 222 | 333461.2 | 4003342 | 1541 | 2067 |
| 223 | 347876.6 | 103669 | 290 | 2971 |
| 224 | 413842.1 | 173591 | 1 | 366 |
| 225 | 235867.2 | 343653 | 1519 | 2159 |
| 226 | 199636.2 | 428665 | 800 | 2432 |
| 227 | 2234.3 | 627654 | 124 | 682 |
| 228 | 1000139.13 | 690313 | 557 | 1118 |
| 229 | 998534.1 | 885129 | 1823 | 2762 |
| 230 | 372377.6 | 1315115 | 2445 | 2827 |
| 231 | 1101412.4 | 1340504 | 440 | 938 |
| 232 | 261567.5 | 1384823 | 32 | 576 |
| 233 | 232713.2 | 1405652 | 436 | 2078 |
| 234 | 214335.13 | 1439126 | 904 | 2629 |
| 235 | 331022.33 | 1485479 | 3584 | 4373 |
| 236 | 332259.3 | 1513664 | 2446 | 3297 |
| 237 | 253570.8 | 1516301 | 467 | 1240 |
| 238 | 995529.5 | 1525795 | 337 | 1781 |
| 239 | 474435.16 | 1610523 | 1323 | 2032 |
| 240 | 994861.1 | 1623237 | 9447 | 10862 |
| 241 | g545708 | 1668794 | 39 | 798 |
| 242 | 347965.2 | 1672749 | 734 | 1895 |
| 243 | 202361.1 | 1700047 | 1121 | 1558 |
| 244 | 369950.12 | 1702350 | 840 | 1323 |
| 245 | 331403.8 | 1746529 | 2145 | 2537 |
| 246 | 233889.3 | 1758241 | 687 | 941 |
| 247 | 21148.4 | 1760517 | 462 | 1583 |
| 248 | 976749.1 | 1773638 | 1907 | 2394 |
| 249 | 252719.12 | 1809385 | 61 | 1008 |
| 250 | g6063478 | 1926006 | 3426 | 4214 |
| 251 | 347314.3 | 2007691 | 1146 | 2115 |
| 252 | g3213196 | 2007691 | 1240 | 2209 |
| 253 | 245184.3 | 2056395 | 946 | 2668 |
| 254 | 243574.11 | 2121863 | 581 | 836 |
| 255 | 474826.6 | 2175008 | 4211 | 4706 |
| 256 | 997347.6 | 2195430 | 2222 | 2834 |
| 257 | 222049.1 | 2365295 | 62 | 588 |
| 258 | 902659.8 | 2449837 | 403 | 806 |
| 259 | 2508261 | 2508261 | 541 | 2671 |
| 260 | 232945.12 | 2645840 | 968 | 2501 |
| 261 | 445101.8 | 2781405 | 911 | 1316 |
| 262 | 255750.1 | 2901811 | 129 | 471 |
| 263 | 988231.7 | 2902903 | 435 | 1058 |
| 264 | 444902.6 | 2949427 | 92 | 664 |
| 265 | 407546.8 | 2970280 | 564 | 1888 |
| 266 | 346511.4 | 3214930 | 17 | 588 |
| 267 | 346511.5 | 3214930 | 81 | 652 |
| 268 | 1098141.1 | 3563535 | 4062 | 4478 |
| 269 | 238089.2 | 4385292 | 1184 | 3103 |
| 270 | 1100105.3 | 1001730 | 91 | 1412 |
| 271 | 474729.2 | 1443061 | 319 | 2116 |
| 272 | 363000.3 | 1510424 | 965 | 2927 |
| 273 | 395096.3 | 1723834 | 2914 | 3253 |
| 274 | 374086.1 | 1813133 | 89 | 862 |
| 275 | 444495.4 | 2104530 | 743 | 1309 |
| 276 | 474876.2 | 2104530 | 148 | 472 |

[0193] TABLE 3

| | | | | | | | | | | | | |
|---|---|---|---|---|---|---|---|---|---|---|---|---|
| SEQ | | | | | | | | | | | | |
| ID | | | | | | | | | | max | max | max |
| NO | Incyte ID | Gene Annotation | 0h | 0.5h | 2.5h | 8h | 1d | 2d | 4d | up | down | diff |

| | | | | | | | | | | | | | | |
|---|---|---|---|---|---|---|---|---|---|---|---|---|---|---|
| 1 | 3034487 | solute carrier family 4, sodium bicarbonate | 1.00 | 0.96 | 1.15 | 2.02 | 1.20 | 1.45 | 3.51 | 3.51 | 0.96 | 3.51 | up- | |
| | | cotransporter, member 6 | | | | | | | | | | | regu- | |
| | | | | | | | | | | | | | | lated |
| 2 | g34387 | annexin I (lipocortin I) | 1.00 | 1.23 | 1.33 | 1.23 | 2.83 | 2.54 | 1.86 | 2.83 | 1.00 | 2.83 | | |
| 3 | 247178.2 | sperm surface protein | 1.00 | 0.99 | 1.11 | 1.24 | 2.00 | 1.93 | 2.00 | 2.00 | 0.99 | 2.00 | | |
| 4 | 567938 | integrin, alpha X (antigen CD11C (p150), | 1.00 | 1.03 | 1.05 | 0.95 | 2.11 | 1.53 | 2.45 | 2.45 | 0.95 | 2.45 | | |
| | | alpha polypeptide) | | | | | | | | | | | | |
| 5 | 351122.2 | integrin, beta 3 (platelet glycoprotein | 1.00 | 1.05 | 1.07 | 0.87 | 3.20 | 2.22 | 2.61 | 3.20 | 0.87 | 3.20 | | |
| | | IIIa, antigen CD61) | | | | | | | | | | | | |
| 6 | 481379.9 | paired basic amino acid cleaving enzyme | 1.00 | 1.08 | 1.01 | 1.03 | 2.06 | 1.99 | 1.57 | 2.06 | 1.00 | 2.06 | | |
| | | (furin, membrane associated receptor protein) | | | | | | | | | | | | |
| 7 | 215391.7 | phosphogluconate dehydrogenase | 1.00 | 1.47 | 1.24 | 1.78 | 2.59 | 2.49 | 2.54 | 2.59 | 1.00 | 2.59 | | |
| 8 | 243812.1 | protein kinase mitogen- activated 13 | 1.00 | 1.17 | 1.19 | 0.96 | 2.27 | 1.91 | 2.68 | 2.68 | 0.96 | 2.68 | | |
| 9 | 1085755.1 | folate receptor 1 (adult) | 1.00 | 0.80 | 1.00 | 1.07 | 2.28 | 1.89 | 2.16 | 2.28 | 0.80 | 2.28 | | |
| 10 | 347809.3 | solute carrier family 6 (neurotransmitter | 1.00 | 1.06 | 1.33 | 1.21 | 2.65 | 2.13 | 3.06 | 3.06 | 1.00 | 3.06 | | |
| | | transporter, taurine), member 6 | | | | | | | | | | | | |
| 11 | 331734.4 | prostaglandin-endoperoxide synthase 1 | 1.00 | 1.20 | 1.17 | 1.30 | 2.08 | 1.50 | 1.72 | 2.08 | 1.00 | 2.08 | | |
| | | (prostaglandin G/H synthase and cyclooxygena | | | | | | | | | | | | |
| 12 | 116840.38 | interferon regulatory factor 3 | 1.00 | 1.15 | 1.02 | 0.94 | 2.31 | 2.37 | 1.85 | 2.37 | 0.94 | 2.37 | | |
| 13 | 903565.11 | proprotein convertase subtilisin/kexin type 4 | 1.00 | 1.11 | 1.18 | 1.13 | 2.12 | 1.68 | 2.50 | 2.50 | 1.00 | 2.50 | | |
| 14 | 903565.8 | Human mRNA for PACE4E-I, complete cds. | 1.00 | 1.11 | 1.18 | 1.13 | 2.12 | 1.68 | 2.50 | 2.50 | 1.00 | 2.50 | | |
| 15 | 474310.13 | transglutaminase 2 (C polypeptide, | 1.00 | 1.20 | 1.09 | 0.78 | 2.17 | 3.20 | 3.29 | 3.29 | 0.78 | 3.29 | | |
| | | protein-glutamine-gamma-glutamyltransferase) | | | | | | | | | | | | |
| 16 | 413006.13 | differentiated Embryo Chondrocyte | 1.00 | 1.17 | 1.03 | 1.07 | 2.16 | 2.25 | 1.59 | 2.25 | 1.00 | 2.25 | | |
| | | expressed gene 1 | | | | | | | | | | | | |
| 17 | 76460.2 | pyridoxal (pyridoxine, vitamin B6) kinase | 1.00 | 1.23 | 1.16 | 1.54 | 2.51 | 1.61 | 1.90 | 2.51 | 1.00 | 2.51 | | |
| 18 | 474374.4 | pim-1 oncogene | 1.00 | 1.16 | 1.09 | 1.13 | 3.56 | 2.75 | 3.02 | 3.56 | 1.00 | 3.56 | | |
| 19 | 427792.8 | cathepsin B | 1.00 | 1.25 | 1.01 | 1.51 | 2.13 | 1.78 | 1.37 | 2.13 | 1.00 | 2.13 | | |
| 20 | 364482.3 | carnitine palmitoyltransferase I, liver | 1.00 | 0.81 | 0.98 | 1.25 | 2.08 | 2.06 | 1.61 | 2.08 | 0.81 | 2.08 | | |
| 21 | 978487.1 | carnitine palmitoyltransferase I, liver | 1.00 | 0.81 | 0.98 | 1.25 | 2.08 | 2.06 | 1.61 | 2.08 | 0.81 | 2.08 | | |
| 22 | 410626.2 | Human retinoid X receptor-gamma | 1.00 | 1.08 | 1.19 | 1.66 | 2.48 | 2.51 | 3.09 | 3.09 | 1.00 | 3.09 | | |
| | | mRNA, complete cds | | | | | | | | | | | | |
| 23 | 234480.6 | glutaredoxin (thioltransferase) | 1.00 | 0.91 | 0.91 | 0.78 | 3.65 | 3.13 | 1.08 | 3.65 | 0.78 | 3.65 | | |
| 24 | 253542.2 | dual specificity phosphatase 5 | 1.00 | 0.92 | 0.84 | 1.01 | 3.83 | 3.38 | 2.23 | 3.83 | 0.84 | 3.83 | | |
| 25 | 234202.24 | microsomal glutathione S-transferase 1 | 1.00 | 0.93 | 1.02 | 1.28 | 3.07 | 2.33 | 1.68 | 3.07 | 0.93 | 3.07 | | |
| 26 | 253946.4 | interleukin 6 signal transducer | 1.00 | 1.01 | 1.29 | 1.07 | 2.04 | 0.94 | 2.24 | 2.24 | 0.94 | 2.24 | | |
| | | (gp130, oncostatin M receptor) | | | | | | | | | | | | |
| 27 | 348801.1 | pro-platelet basic protein | 1.00 | 1.01 | 1.03 | 1.00 | 3.77 | 3.69 | 1.81 | 3.77 | 1.00 | 3.77 | | |
| 28 | 980611.1 | matrilin 1, cartilage matrix protein | 1.00 | 0.94 | 0.92 | 0.90 | 2.86 | 0.73 | 1.25 | 2.86 | 0.73 | 2.86 | | |
| 29 | 283885.8 | dual-specificity tyrosine-(Y)-phosphorylation | 1.00 | 1.13 | 1.08 | 0.88 | 2.64 | 1.06 | 1.75 | 2.64 | 0.88 | 2.64 | | |
| | | regulated kinase 4 | | | | | | | | | | | | |
| 30 | 348196.33 | antigen identified by monoclonal antibodies | 1.00 | 1.14 | 0.98 | 1.35 | 2.96 | 2.07 | 1.64 | 2.96 | 0.98 | 2.96 | | |
| | | 4F2, TRA1.10, TROP4, and T43 | | | | | | | | | | | | |
| 31 | 256009.4 | AHNAK nucleoprotein (desmoyokin) | 1.00 | 1.17 | 1.33 | 0.98 | 2.32 | 2.35 | 0.98 | 2.35 | 0.98 | 2.35 | | |
| 32 | 481594.12 | Human RACH1 (RACH1) mRNA, | 1.00 | 1.24 | 1.27 | 0.72 | 2.59 | 0.79 | 0.79 | 2.59 | 0.72 | 2.59 | | |
| | | complete cds | | | | | | | | | | | | |
| 33 | 978788.1 | Human RACH1 (RACH1) mRNA, | 1.00 | 1.24 | 1.27 | 0.72 | 2.59 | 0.79 | 0.79 | 2.59 | 0.72 | 2.59 | | |
| | | complete cds | | | | | | | | | | | | |
| 34 | 335171.1 | integrin, alpha 2 (CD49B, alpha 2 | 1.00 | 1.13 | 1.16 | 0.68 | 2.13 | 1.10 | 2.34 | 2.34 | 0.68 | 2.34 | | |
| | | subunit of VLA-2 receptor) | | | | | | | | | | | | |
| 35 | 998433.2 | ESTs, Highly similar to DIAMINE | 1.00 | 1.22 | 1.15 | 1.38 | 2.81 | 2.41 | 2.27 | 2.81 | 1.00 | 2.81 | | |
| | | ACETYLTRANSFERASE [H. sapiens] | | | | | | | | | | | | |
| 36 | 221928.9 | ESTs | 1.00 | 0.94 | 1.02 | 1.09 | 3.25 | 2.26 | 2.72 | 3.25 | 0.94 | 3.25 | | |
| 37 | 331291.3 | Homo sapiens mRNA for KIAA0291 | 1.00 | 1.26 | 1.17 | 1.15 | 2.42 | 1.44 | 1.65 | 2.42 | 1.00 | 2.42 | | |
| | | gene, partial cds | | | | | | | | | | | | |
| 38 | 233331.3 | Homo sapiens KIAA0439 mRNA, partial cds | 1.00 | 1.18 | 1.11 | 0.80 | 2.12 | 2.75 | 2.47 | 2.75 | 0.80 | 2.75 | | |
| 39 | 474682.2 | ESTs, Weakly similar to W01A11.2 | 1.00 | 1.17 | 1.34 | 1.27 | 3.61 | 2.29 | 3.71 | 3.71 | 1.00 | 3.71 | | |
| | | gene product [C.elegans] | | | | | | | | | | | | |
| 40 | 3161.7 | ESTs, Weakly similar to (defline not | 1.00 | 1.06 | 1.02 | 0.84 | 2.84 | 1.13 | 1.03 | 2.84 | 0.84 | 2.84 | | |
| | | available 4529890) [H. sapiens] | | | | | | | | | | | | |
| 41 | 984248.1 | ESTs | 1.00 | 1.02 | 1.01 | 0.73 | 2.14 | 0.75 | 1.37 | 2.14 | 0.73 | 2.14 | | |
| 42 | 196590.2 | ESTs | 1.00 | 1.12 | 1.08 | 0.76 | 2.41 | 0.82 | 0.75 | 2.41 | 0.75 | 2.41 | | |
| 43 | 255109.1 | ESTs | 1.00 | 1.12 | 1.08 | 0.76 | 2.41 | 0.82 | 0.75 | 2.41 | 0.75 | 2.41 | | |
| 44 | 238622.1 | Human clone 46690 brain expressed | 1.00 | 1.06 | 0.93 | 0.77 | 2.11 | 0.95 | 2.04 | 2.11 | 0.77 | 2.11 | | |
| | | mRNA from chromosome X | | | | | | | | | | | | |
| 45 | 334385.3 | Homo sapiens mRNA for KIAA0284 | 1.00 | 1.20 | 1.13 | 0.87 | 2.00 | 0.83 | 1.39 | 2.00 | 0.83 | 2.00 | | |
| | | gene, partial cds | | | | | | | | | | | | |
| 46 | 998997.1 | ESTs | 1.00 | 1.05 | 1.01 | 2.37 | 0.84 | 0.93 | 1.18 | 2.37 | 0.84 | 2.37 | | |
| 47 | 200578.1 | ESTs | 1.00 | 1.18 | 1.25 | 1.75 | 5.54 | 5.02 | 3.11 | 5.54 | 1.00 | 5.54 | | |
| 48 | 208134.1 | ESTs | 1.00 | 1.17 | 1.09 | 0.81 | 3.53 | 2.33 | 4.59 | 4.59 | 0.81 | 4.59 | | |
| 49 | 153659.2 | interleukin 1 receptor antagonist | 1.00 | 1.33 | 1.29 | 1.26 | 2.00 | 3.16 | 4.88 | 4.88 | 1.00 | 4.88 | | |
| 50 | 241930.15 | liver X receptor, alpha | 1.00 | 1.13 | 1.28 | 2.29 | 2.15 | 2.27 | 4.34 | 4.34 | 1.00 | 4.34 | | |
| 51 | 413466.5 | adipose differentiation-related | 1.00 | 1.62 | 2.66 | 4.30 | 7.11 | 7.12 | 14.12 | 14.12 | 1.00 | 14.12 | | |
| | | protein; adipophilin | | | | | | | | | | | | |
| 52 | 3249239 | colony stimulating factor 1 (macrophage) | 1.00 | 1.20 | 1.18 | 1.24 | 2.42 | 2.41 | 4.73 | 4.73 | 1.00 | 4.73 | | |
| 53 | 337518.18 | CD36 antigen (collagen type I receptor, | 1.00 | 1.19 | 1.39 | 2.00 | 3.49 | 2.68 | 4.32 | 4.32 | 1.00 | 4.32 | | |
| | | thrombospondin receptor) | | | | | | | | | | | | |
| 54 | g3116213 | SH3 binding protein | 1.00 | 1.25 | 1.10 | 1.50 | 4.20 | 3.19 | 2.44 | 4.20 | 1.00 | 4.20 | | |
| 55 | g5912216 | SH3 binding protein | 1.00 | 1.25 | 1.10 | 1.50 | 4.20 | 3.19 | 2.44 | 4.20 | 1.00 | 4.20 | | |
| 171 | 202023.6 | 3-hydroxy-3-methylglutaryl-Coenzyme | 1.00 | 0.96 | 0.87 | 0.50 | 0.52 | 0.68 | 0.61 | 1.00 | 0.50 | 2.01 | down- | |
| | | A reductase | | | | | | | | | | | regu- | |
| | | | | | | | | | | | | | lated | |
| 172 | 350423.5 | farnesyl-diphosphate farnesyltransferase 1 | 1.00 | 1.19 | 1.05 | 0.49 | 0.47 | 0.55 | 0.54 | 1.19 | 0.47 | 2.14 | | |
| 173 | 1100023.1 | cytochrome P450, 51 (lanosterol | 1.00 | 1.31 | 1.33 | 0.62 | 0.41 | 0.59 | 0.70 | 1.33 | 0.41 | 2.44 | | |
| | | 14-alpha-demethylase) | | | | | | | | | | | | |
| 174 | 414196.8 | S100 calcium-binding protein A4 | 1.00 | 1.06 | 1.06 | 0.97 | 0.34 | 0.61 | 0.41 | 1.06 | 0.34 | 2.91 | | |
| 175 | 331106.6 | integrin, alpha 6 | 1.00 | 0.94 | 1.05 | 1.08 | 0.45 | 0.76 | 0.81 | 1.08 | 0.45 | 2.23 | | |
| 176 | g180670 | matrix metalloproteinase 2 (gelatinase A, 72 | 1.00 | 1.22 | 1.13 | 0.92 | 0.48 | 0.72 | 0.67 | 1.22 | 0.48 | 2.10 | | |
| | | kD gelatinase, 72 kD type IV collagenase) | | | | | | | | | | | | |
| 177 | 236574.12 | macrophage-associated antigen | 1.00 | 1.17 | 1.20 | 0.95 | 0.40 | 0.54 | 1.04 | 1.20 | 0.40 | 2.48 | | |
| 178 | 1000033.6 | alpha-2-macroglobulin | 1.00 | 1.09 | 1.01 | 0.85 | 0.39 | 0.85 | 1.03 | 1.09 | 0.39 | 2.57 | | |
| 179 | 37567.22 | RAN binding protein 1 | 1.00 | 0.90 | 0.98 | 0.99 | 0.49 | 0.56 | 0.52 | 1.00 | 0.49 | 2.04 | | |
| 180 | 995610.1 | v-myc avian myelocytomatosis | 1.00 | 1.17 | 1.16 | 0.91 | 0.46 | 0.81 | 0.86 | 1.17 | 0.46 | 2.19 | | |
| | | viral oncogene homolog | | | | | | | | | | | | |
| 181 | 1702374 | v-myc avian myelocytomatosis viral oncogene | 1.00 | 1.11 | 1.08 | 0.81 | 0.49 | 0.77 | 0.58 | 1.11 | 0.49 | 2.03 | | |
| | | homolog 1, lung carcinoma derived | | | | | | | | | | | | |
| 182 | 427883.47 | Homo sapiens LST1 mRNA, cLST1/E | 1.00 | 1.15 | 0.98 | 1.00 | 0.40 | 0.76 | 0.45 | 1.15 | 0.40 | 2.49 | | |
| | | splice variant, complete cds | | | | | | | | | | | | |
| 183 | 93687.6 | uncoupling protein 2 (mitochondrial, | 1.00 | 1.09 | 1.12 | 1.05 | 0.50 | 0.51 | 0.46 | 1.12 | 0.46 | 2.18 | | |
| | | proton carrier) | | | | | | | | | | | | |
| 184 | 414100.4 | leukocyte-associated Ig-like receptor 1 | 1.00 | 1.09 | 1.10 | 1.26 | 0.40 | 0.49 | 0.51 | 1.26 | 0.40 | 2.47 | | |
| 185 | 235148.4 | arachidonate 5-lipoxygenase-activating protein | 1.00 | 0.96 | 0.96 | 0.98 | 0.30 | 0.48 | 0.86 | 1.00 | 0.30 | 3.39 | | |
| 186 | 430039.3 | CD14 antigen | 1.00 | 1.17 | 1.10 | 0.99 | 0.48 | 0.63 | 1.10 | 1.17 | 0.48 | 2.07 | | |
| 187 | 2158373F6 | platelet-derived growth factor | 1.00 | 1.03 | 0.97 | 1.05 | 0.49 | 1.00 | 1.46 | 1.46 | 0.49 | 2.04 | | |
| | | alpha polypeptide | | | | | | | | | | | | |
| 188 | 1098815.7 | Not mapped | 1.00 | 0.93 | 0.96 | 1.13 | 0.50 | 0.78 | 0.53 | 1.13 | 0.50 | 2.00 | | |
| 189 | 474491.18 | Human apurinic/apyrimidinic endonuclease | 1.00 | 1.18 | 1.13 | 1.28 | 0.48 | 0.83 | 0.76 | 1.28 | 0.48 | 2.09 | | |
| | | mRNA, complete cds. | | | | | | | | | | | | |
| 190 | 474491.19 | ref-1 | 1.00 | 1.18 | 1.13 | 1.28 | 0.48 | 0.83 | 0.76 | 1.28 | 0.48 | 2.09 | | |
| 191 | 419031.5 | leukotriene A4 hydrolase | 1.00 | 1.19 | 0.95 | 1.40 | 0.35 | 0.63 | 0.64 | 1.40 | 0.35 | 2.84 | | |
| 192 | 399658.1 | Not mapped | 1.00 | 1.11 | 1.00 | 0.77 | 0.46 | 0.53 | 1.47 | 1.47 | 0.46 | 2.18 | | |
| 193 | 474913.3 | ESTs | 1.00 | 1.01 | 0.98 | 0.77 | 0.35 | 1.00 | 0.81 | 1.01 | 0.35 | 2.84 | | |
| 194 | 199898.3 | Human G0S2 protein gene, complete cds | 1.00 | 1.07 | 1.10 | 0.87 | 0.21 | 0.41 | 0.56 | 1.10 | 0.21 | 4.84 | | |
| 195 | 253550.14 | insulin-like growth factor binding protein 3 | 1.00 | 1.06 | 1.06 | 1.37 | 0.28 | 0.90 | 1.18 | 1.37 | 0.28 | 3.62 | | |
| 196 | 331597.2 | cytochrome b-245, beta polypeptide | 1.00 | 1.14 | 1.08 | 1.02 | 0.25 | 0.28 | 0.16 | 1.14 | 0.16 | 6.32 | | |
| | | (chronic granulomatous disease) | | | | | | | | | | | | |

[0194] TABLE 4

| SEQ | | | | | | | | | | | | | |
|---|---|---|---|---|---|---|---|---|---|---|---|---|---|
| ID | | | | | | | | | | max | max | max | |
| NO | Incyte ID | Gene Annotation | 0h | 0.5h | 2.5h | 8h | 1d | 2d | 4d | up | down | diff | |
| 47 | 200578.1 | ESTs | 1.00 | 1.18 | 1.25 | 1.75 | 5.54 | 5.02 | 3.11 | 5.54 | 1.00 | 5.54 | up- |
| | | | | | | | | | | | | | regu- |
| | | | | | | | | | | | | | lated |
| 48 | 208134.1 | ESTs | 1.00 | 1.17 | 1.09 | 0.81 | 3.53 | 2.33 | 4.59 | 4.59 | 0.81 | 4.59 | |
| 49 | 153659.2 | interleukin 1 receptor antagonist | 1.00 | 1.33 | 1.29 | 1.26 | 2.00 | 3.16 | 4.88 | 4.88 | 1.00 | 4.88 | |
| 50 | 241930.15 | liver X receptor, alpha | 1.00 | 1.13 | 1.28 | 2.29 | 2.15 | 2.27 | 4.34 | 4.34 | 1.00 | 4.34 | |
| 51 | 413466.5 | adipose differentiation-related | 1.00 | 1.62 | 2.66 | 4.30 | 7.11 | 7.12 | 14.12 | 14.12 | 1.00 | 14.12 | |
| | | protein; adipophilin | | | | | | | | | | | |
| 52 | 3249239 | colony stimulating factor 1 (macrophage) | 1.00 | 1.20 | 1.18 | 1.24 | 2.42 | 2.41 | 4.73 | 4.73 | 1.00 | 4.73 | |
| 53 | 337518.18 | CD36 antigen (collagen type I | 1.00 | 1.19 | 1.39 | 2.00 | 3.49 | 2.68 | 4.32 | 4.32 | 1.00 | 4.32 | |
| | | receptor, thrombospondin receptor) | | | | | | | | | | | |
| 54 | g3116213 | SH3 binding protein | 1.00 | 1.25 | 1.10 | 1.50 | 4.20 | 3.19 | 2.44 | 4.20 | 1.00 | 4.20 | |
| 55 | g5912216 | SH3 binding protein | 1.00 | 1.25 | 1.10 | 1.50 | 4.20 | 3.19 | 2.44 | 4.20 | 1.00 | 4.20 | |
| 56 | 992917.1 | ferritin, heavy polypeptide 1 | 1.00 | 1.02 | 1.04 | 1.18 | 1.70 | 1.96 | 4.90 | 4.90 | 1.00 | 4.90 | |
| 57 | 411424.12 | LIM and senescent cell antigen-like domains 1 | 1.00 | 1.03 | 1.16 | 1.65 | 1.25 | 1.61 | 4.11 | 4.11 | 1.00 | 4.11 | |
| 58 | 995600.17 | Homo sapiens clone 24649 mRNA sequence | 1.00 | 1.00 | 0.99 | 1.07 | 1.04 | 1.03 | 5.85 | 5.85 | 0.99 | 5.85 | |
| 59 | 441292.7 | epithelial membrane protein 1 | 1.00 | 1.18 | 1.05 | 1.30 | 1.50 | 3.13 | 6.00 | 6.00 | 1.00 | 6.00 | |
| 60 | 42176.5 | Down syndrome candidate region 1 | 1.00 | 1.34 | 1.53 | 1.85 | 1.17 | 2.49 | 6.83 | 6.83 | 1.00 | 6.83 | |
| 61 | 234537.3 | 5′ nucleotidase (CD73) | 1.00 | 1.00 | 1.08 | 1.00 | 1.69 | 2.36 | 6.22 | 6.22 | 1.00 | 6.22 | |
| 62 | 470468.21 | uridine phosphorylase | 1.00 | 1.30 | 1.03 | 1.18 | 1.93 | 2.46 | 5.37 | 5.37 | 1.00 | 5.37 | |
| 63 | 240120.3 | diphtheria toxin receptor (heparin-binding | 1.00 | 1.03 | 0.95 | 0.98 | 1.82 | 2.95 | 7.00 | 7.00 | 0.95 | 7.00 | |
| | | epidermal growth factor-like growth fact | | | | | | | | | | | |
| 64 | 28779.3 | small inducible cytokine subfamily A | 1.00 | 0.97 | 1.00 | 1.26 | 0.56 | 2.02 | 8.18 | 8.18 | 0.56 | 8.18 | |
| | | (Cys-Cys), member 20 | | | | | | | | | | | |
| 65 | 238627.2 | BCL2-related protein A1 | 1.00 | 1.12 | 0.97 | 1.25 | 0.42 | 1.69 | 3.85 | 3.85 | 0.42 | 3.85 | |
| 66 | 254107.1 | thrombomodulin | 1.00 | 1.05 | 0.93 | 0.89 | 2.12 | 6.24 | 2.12 | 6.24 | 0.89 | 6.24 | |
| 67 | 330908.2 | leukemia inhibitory factor (cholinergic | 1.00 | 1.08 | 1.06 | 0.79 | 1.40 | 3.87 | 1.04 | 3.87 | 0.79 | 3.87 | |
| | | differentiation factor) | | | | | | | | | | | |
| 194 | 199898.3 | Human G0S2 protein gene, complete cds | 1.00 | 1.07 | 1.10 | 0.87 | 0.21 | 0.41 | 0.56 | 1.10 | 0.21 | 4.84 | down- |
| | | | | | | | | | | | | | regu- |
| | | | | | | | | | | | | | lated |
| 195 | 253550.14 | insulin-like growth factor binding protein 3 | 1.00 | 1.06 | 1.06 | 1.37 | 0.28 | 0.90 | 1.18 | 1.37 | 0.28 | 3.62 | |
| 196 | 331597.2 | cytochrome b-245, beta polypeptide | 1.00 | 1.14 | 1.08 | 1.02 | 0.25 | 0.28 | 0.16 | 1.14 | 0.16 | 6.32 | |
| | | (chronic granulomatous disease) | | | | | | | | | | | |
| 197 | 997377.1 | ribonuclease, RNase A family, 3 | 1.00 | 0.99 | 0.99 | 0.75 | 1.25 | 0.77 | 0.28 | 1.25 | 0.28 | 3.55 | |
| | | (eosinophil cationic protein) | | | | | | | | | | | |
| 198 | 42869.3 | cathepsin G | 1.00 | 1.14 | 1.04 | 0.80 | 1.60 | 0.84 | 0.20 | 1.60 | 0.20 | 4.98 | |
| 199 | 248306.1 | carbonic anhydrase II | 1.00 | 0.92 | 1.03 | 0.92 | 1.46 | 1.19 | 0.13 | 1.46 | 0.13 | 7.58 | |
| 200 | 247220.15 | thymidylate synthetase | 1.00 | 1.14 | 1.12 | 1.12 | 0.77 | 0.23 | 0.25 | 1.14 | 0.23 | 4.34 | |
| 201 | 26662.3 | centromere protein F (350/400 kD, mitosin) | 1.00 | 1.24 | 1.15 | 1.03 | 0.87 | 0.38 | 0.29 | 1.24 | 0.29 | 3.40 | |
| 202 | 977509.3 | v-myb avian myeloblastosis viral oncogene | 1.00 | 1.21 | 1.10 | 0.81 | 0.77 | 0.25 | 0.27 | 1.21 | 0.25 | 3.95 | |
| | | homolog-like 2 | | | | | | | | | | | |
| 203 | 221961.2 | myeloid cell nuclear differentiation antigen | 1.00 | 1.04 | 1.22 | 0.82 | 0.99 | 0.95 | 0.18 | 1.22 | 0.18 | 5.58 | |
| 204 | 246824.1 | ribonuclease, RNase A family, 2 | 1.00 | 1.15 | 1.03 | 0.97 | 1.17 | 0.71 | 0.19 | 1.17 | 0.19 | 5.33 | |
| | | (liver, eosinophil-derived neurotoxin) | | | | | | | | | | | |
| 205 | 407557.2 | cyclin-dependent kinase inhibitor | 1.00 | 1.21 | 1.03 | 0.80 | 1.09 | 0.43 | 0.24 | 1.21 | 0.24 | 4.17 | |
| | | 2C (p18, inhibits CDK4) | | | | | | | | | | | |
| 206 | 372981.2 | Homo sapiens ZW10 interactor | 1.00 | 1.10 | 1.07 | 1.17 | 0.62 | 0.30 | 0.29 | 1.17 | 0.29 | 3.48 | |
| | | Zwint mRNA, complete cds | | | | | | | | | | | |
| 207 | 201409.6 | Fc fragment of IgG, high affinity | 1.00 | 1.25 | 1.07 | 1.21 | 0.90 | 0.58 | 0.23 | 1.25 | 0.23 | 4.27 | |
| | | Ia, receptor for (CD64) | | | | | | | | | | | |
| 208 | 331025.1 | Homo sapiens mitotic centromere-associated | 1.00 | 1.10 | 1.04 | 0.91 | 0.90 | 0.48 | 0.26 | 1.10 | 0.26 | 3.89 | |
| | | kinesin mRNA, complete cds | | | | | | | | | | | |
| 209 | 247515.1 | elastase 2, neutrophil | 1.00 | 0.96 | 1.11 | 0.95 | 1.11 | 1.08 | 0.29 | 1.11 | 0.29 | 3.48 | |
| 210 | 199471.2 | MAD2 (mitotic arrest deficient, | 1.00 | 1.05 | 1.02 | 0.69 | 0.99 | 0.28 | 0.31 | 1.05 | 0.28 | 3.60 | |
| | | yeast, homolog)-like 1 | | | | | | | | | | | |
| 211 | 2916753 | high-mobility group (nonhistone | 1.00 | 1.05 | 0.99 | 1.25 | 0.94 | 0.36 | 0.19 | 1.25 | 0.19 | 5.37 | |
| | | chromosomal) protein 2 | | | | | | | | | | | |
| 212 | 343899.2 | hyaluronan-mediated motility | 1.00 | 1.08 | 1.14 | 0.94 | 0.88 | 1.02 | 0.26 | 1.14 | 0.26 | 3.81 | |
| | | receptor (RHAMM) | | | | | | | | | | | |
| 213 | 335775.2 | lamin B1 | 1.00 | 1.05 | 1.09 | 1.07 | 0.52 | 0.32 | 0.18 | 1.09 | 0.18 | 5.44 | |

The application's sequence listing, which the Patent Office published only in electronic form, follows.

SEQUENCE LISTING (276 sequences)

SEQ ID NO: 1 - DNA, 4159 bp, Homo sapiens
  misc_feature: Incyte ID No: 440295.10
  unsure 3348, 3353, 3363-3384, 3845, 4116-4117, 4125, 4142, 4150, 4152: a, t, c, g, or other
ccttggagactagaaagaaactgctagatggctgtaacacagttcatccatttccgtgaagagatcatggggaatatgttcttcatcatcatcttcagtaccaaggataaactgtgttacagagatggagaagaatatgaatggaaagaaactgctagatggctgaaatttgaagaggatgttgaagatggcggtgaccgatggagtaaaccttatgtggcaactctctctttgcacagtctttttgaactaaggagttgcatcctcaatggaacagtcatgctggatatgagagcaagcactctagatgaaatagcagatatggtattagacaacatgatagcttctggccaattagacgagtccatacgagagaatgtcagagaagctcttctgaagagacatcatcatcagaatgagaaaagattcaccagtcggattcctcttgttcgatcttttgcagatataggcaagaaacattctgaccctcacttgcttgaaaggaatggtattttggcctctccccagtctgctcctggaaacttggacaatagtaaaagtggagaaattaaaggtaatggaagtggtggaagcagagaaaatagtactgttgacttcagcaaggttgatatgaatttcatgagaaaaattcctacgggtgctgaggcatccaacgtcctggtgggcgaagtagactttttggaaaggccaataattgcatttgtgagactggctcctgctgtcctccttacagggttgactgaggtccctgttccaaccaggtttttgtttttgttattgggtccagcgggcaaggcaccacagtaccatgaaattggacgatcaatagccactctcatgacagatgagattttccatgatgtagcttataaagcaaaagacagaaatgacctcttatctggaattgatgaatttttagatcaagtaactgtcctacctccaggagagtgggatccttctatacgcatagaaccaccaaaaagtgtcccttctcaggaaaagagaaagattcctgtgtttcacaatggatctacccccacactgggtgagactcctaaagaggccgctcatcatgctgggcctgagctacagaggactggacggctttttggtggtttgatacttgacatcaaaaggaaagcaccttttttcttgagtgacttcaaggatgcattaagcctgcagtgcctggcctcgattcttttcctatactgtgcctgtatgtctcctgtaatcacttttggagggctgcttggagaagctacagaaggcagaataagtgcaatagagtctctttttggagcatcattaactgggattgcctattcattgtttgctgggcaacctctaacaatattggggagcacaggtccagttctagtgtttgaaaaaattttatataaattctgcagagattatcaactttcttatctgtctttaagaaccagtattggtctgtggacttcttttttgtgcattgttttggttgcaacagatgcaagcagccttgtgtgttatattactcgatttacagaagaggcttttgcagcccttatttgcatcatattcatctacgaggctttggagaagctctttgatttaggagaaacatatgcatttaatatgcacaacaacttagataaactgaccagctactcatgtgtatgtactgaacctccaaaccccagcaatgaaactctagcacaatggaagaaagataatataacagcacacaatatttcctggagaaatcttactgtttctgaatgtaaaaaacttcgtggtgtattcttggggtcagcttgtggtcatcatggaccttatattccagatgtgctcttttggtgtgtcatcttgtttttcacaacattttttctgtcttcattcctcaagcaatttaagaccaagcgttactttcctaccaaggtgcgatcgacaatcagtgattttgctgtatttctcacaatagtaataatggttacaattgactaccttgtaggagttccatctcctaaacttcatgttcctgaaaaatttgagcctactcatccagagagagggtggatcataagcccactgggagataatccttggtggaccttattaatagctgctattcctgctttgctttgtaccattctcatctttatggatcaacaaatcacagctgtaattataaacagaaaggaacacaaattgaagaaaggagctggctatcaccttgatttgctcatggttggcgttatgttgggagtttgctctgtcatgggacttccatggtttgtggctgcaacagtgttgtcaataagtcatgtcaacagcttaaaagttgaatctgaatgttctgctccaggggaacaacccaagtttttgggaattcgtgaacagcgggttacagggctaatgatttttattctaatgggcctctctgtgttcatgacttcagtcctaaagtttattccaatgcctgttctgtatggtgttttcctttatatgggagtttcctcattaaaaggaatccagttatttgaccgtataaaattatttggaatgcctgctaagcatcagcctgatttgatatacctccgttatgtgccgctctggaaggtccatattttcacagtcattcagcttacttgtttggtccttttatgggtgataaaagtttcagctgctgcagtggtttttcccatgatggttcttgcattagtgtttgtgcgcaaactcatggacctgtgtttcacgaagagagaacttagttggcttgatgatcttatgccagaaagtaagaaaaagaaagaagatgacaaaaagaaaaaagagaaagaggaagctgaacggatgcttcaagacgatgatgatactgtgcaccttccatttgaagggggaagtctcttgcaaattccagtcaaggccctaaaatatagtggtgatccctcaattggtaacatatcagatgaaatggccaaaactgcacagtggaaggcactttccatgaatactgagaatgccaaagtaaccagatctaacatgagtcctgataaacctgtgagtgtgaaataagtttgagatgaaccaagaaagaaatacgtggatgctgaaacttcattatagaattgaaccaagaggcattatacatatagatatatacatatgtaatgtgtgcgtatcatggcactatatataagaatattgtatgtcatgctgtttatgtgtgactaccgggtttttaaaagtagtgtctggagtttgtaatgagcaccgtggagactatgtatttaatgaaatgctctctttgaagtgaggtacatggttctaactattcanatatngattctgttnnnnnnnnnnnnnnnnnnnnnngcaatagaaggatgtggagaaatgctttcagtctacttttcttaaatctctgttcatcagtggcaattcgtaaaaaccttaagtgatactttgtttatatgtttataatttttaggtgtttcctgaaattttcacatattatttcacttttgttagtgctttatgggaagaatagggagtctataccagtgctgtgggaaaaatggtaacatttcagggcttctctatttgtgtttcatttctgtagatgtccatcgtgtttcactaactggcgttttcttagccatagagatgactgtagaacaatagaaactttaataatgatagtttttaacttttatgtttaaattttttttaaatcttaaaaccttcatatctaggtatccattgtgacagacaagtaaaattgcaggtgatttgataattaagcacccataccatttataacttctgaatttaanaagttatacaatgccagtttgcaatagttgattttggatgcccttgtagaatattttttctgaatccttatgctcttttaaagccaatgattcccactctgttctctgccttgtctctctttgtcttaaaatgctttagtttccatcaggttcaagttcttgactattattctcttataagtagtaggcgtaaataatcaggagttagaattctctcagaagggtctatgatcagtattactttattaagaattacctttcattttctctnnatgttatnctttcacttgtgtagantacatttnanagcttgt

SEQ ID NO: 2 - DNA, 1399 bp, Homo sapiens
  misc_feature: Incyte ID No: g34387
agtgtgaaatcttcagagaagaatttctctttagttctttgcaagaaggtagagataaagacactttttcaaaaatggcaatggtatcagaattcctcaagcaggcctggtttattgaaaatgaagagcaggaatatgttcaaactgtgaagtcatccaaaggtggtcccggatcagcggtgagcccctatcctaccttcaatccatcctcggatgtcgctgccttgcataaggccataatggttaaaggtgtggatgaagcaaccatcattgacattctaactaagcgaaacaatgcacagcgtcaacagatcaaagcagcatatctccaggaaacaggaaagcccctggatgaaacacttaagaaagcccttacaggtcaccttgaggaggttgttttagctctgctaaaaactccagcgcaatttgatgctgatgaacttcgtgctgccatgaagggccttggaactgatgaagatactctaattgagattttggcatcaagaactaacaaagaaatcagagacattaacagggtctacagagaggaactgaagagagatctggccaaagacataacctcagacacatctggagattttcggaacgctttgctttctcttgctaagggtgaccgatctgaggactttggtgtgaatgaagacttggctgattcagatgccagggccttgtatgaagcaggagaaaggagaaaggggacagacgtaaacgtgttcaataccatccttaccaccagaagctatccacaacttcgcagagtgtttcagaaatacaccaagtacagtaagcatgacatgaacaaagttctggacctggagttgaaaggtgacattgagaaatgcctcacagctatcgtgaagtgcgccacaagcaaaccagctttctttgcagagaagcttcatcaagccatgaaaggtgttggaactcgccataaggcattgatcaggattatggtttcccgttctgaaattgacatgaatgatatcaaagcattctatcagaagatgtatggtatctccctttgccaagccatcctggatgaaaccaaaggagattatgagaaaatcctggtggctctttgtggaggaaactaaacattcccttgatggtctcaagctatgatcagaagactttaattatatattttcatcctataagcttaaataggaaagtttcttcaacaggattacagtgtagctacctacatgctgaaaaatatagcctttaaatcatttttatattataactctgtataatagagataagtccattttttaaaaatgttttccccaaaccataaaaccctatacaagttgttctagtaacaatacatgagaaagatgtctatgtagctgaaaataaaatgacgtcacaagac

SEQ ID NO: 3 - DNA, 3791 bp, Homo sapiens
  misc_feature: Incyte ID No: 247178.2
gggctccagccctagtaccctgtcccagcccgagtcgggtccgtcccgtgcgggcaggtgccgcccctctgccggcgacgccccgggccgcccgcccgtccgcttgccaccatggagctggaggacggtgtggtgtatcaggaggagcccggcggctccggggccgtgatgtcggagcgggtgtccggcctggccggctccatctaccgcgagttcgagcggcttatcgggcgctatgacgaggaggtggtcaaagagctgatgccgctggtggtggctgtgctggagaacctggactcggtgttcgcgcaggaccaggagcaccaggtggagctggagctgctgcgggacgacaacgagcagctcatcacccagtacgagcgggagaaggcgctgcgcaagcacgctgaggagaaattcattgaatttgaagactctcaagaacaggaaaaaaaggacttacagacccgagtggaatctttagaatctcaaacaagacaacttgagctgaaagcgaaaaactatgctgaccagattagcagacttgaagaaagagaagcagaactgaagaaggaatataatgcattacatcaaagacacactgagatgatccataattatatggaacatttagaaagaacaaaacttcatcagctctcagggagtgatcaactagaatccacagctcatagtagaattagaaaagaacgccctatatcattaggaattttcccattacctgctggagatggattgcttacacctgatactcagaaaggaggagagacccctggatctgagcaatggaaatttcaggaattaagtcaaccacgttctcataccagcctgaaggatgagctttctgatgttagccaaggcggatctaaagctaccactccagcatcaacagctaattcagatgtggcaacaattcctactgatactcccttaaaggaagaaaacgaaggatttgtgaaggttacagatgcgccaaataaatcagagataagcaaacacattgaagtacaggtagcccaggaaactagaaatgtatctactggctctgctgaaaaggaagaaaagtcagaagttcaagcaatcatcgaatctactcctgagctggatatggacaaagatctcagtggatataaaggttcaagcactcccaccaaaggcatagagaacaaagcttttgatcgcaatacagaatctctctttgaagaactgtcttcagctggctcaggcctaataggagatgtggatgaaggagcagatttactaggaatgggtcgggaagttgagaatcttatattagaaaatacacaactgttggaaaccaaaaatgctttgaacatagtgaagaatgatttgatagcaaaagtggatgaactgacctgtgagaaagatgtgctgcaaggggaattggaggctgtgaagcaagccaaactgaaactagaggaaaagaacagagaattggaggaagagcttaggaaagctcgggcagaagctgaagatgcaaggcaaaaagcaaaagatgacgatgatagtgatattcccacagcccagaggaaacggtttactagagtagaaatggcccgtgttctcatggagcgaaaccagtataaagagagattgatggagcttcaggaagctgttcgatggacagagatgattcgggcatcacgagaaaatccagccatgcaggaaaaaaaaaggtcaagcatttggcagtttttcagccgacttttcagctcctcaagtaacacgactaagaagcctgaaccacctgttaatctgaagtacaatgcacccacgtctcatgttactccgtccgtcaagaaaagaagcagcaccttatctcagctccctggggataagtccaaagcctttgatttccttagtgaagaaactgaagctagtttagcctcacgcagagaacaaaagagagagcagtatcgtcaggtaaaagcacatgttcagaaggaagacggtagagtgcaggcttttggctggagtctgcctcagaagtacaaacaggtaaccaatggtcaaggtgaaaataagatgaaaaatttacctgtgcctgtctatctcagacctctggatgaaaaagatacatcaatgaagctgtggtgtgctgttggagtcaatttatctggtgggaagaccagagatggtggttctgttgttggagcaagtgtattttacaaggatgttgctggtttggatacagaaggcagtaaacagcgaagtgcctctcagagtagtttagataagttagatcaggaacttaaggaacagcagaaggagttaaaaaatcaagaagaattatccagtctagtttggatctgtaccagcactcattcggctacaaaagttcttattattgatgctgttcaacctggcaacatcctagacagtttcactgtttgcaactctcatgttctgtgcattgcaagtgtgccaggtgcacgagaaacagactaccctgcaggagaagatctttcagaatctggtcaggtagacaaagcatctttatgtggaagtatgacaagcaacagctcagcagagacagacagcctgttaggaggcatcacagtggttggttgttctgcagaaggtgtgacgggagctgccacttcccctagtacaaatggtgcttctccagtgatggataaaccaccagaaatggaagcagaaaatagtgaggttgatgaaaatgttccaacagcagaagaagcaactgaagctacagaagggaatgcggggtcagctgaagacacagtggacatctcccaaactggcgtctacacagagcatgtctttacagatcctttgggagttcagatcccagaagacctctccccagtgtatcagtcgagcaatgactcagatgcatataaagatcaaatatcagtactgccaaatgaacaagacttggtgagagaagaagcccagaaaatgagtagtcttttaccaactatgtggcttggagctcaaaatggctgtttgtatgtccattcatctgtagcccagtggaggaaatgtctccattccattaaacttaaagattcgattctcagtattgtacacgtgaagggaatcgtgttagtagccctggctgacggcacccttgcaatctttcacagaggagtggatgggcagtgggatttgtcaaactatcacctcttagaccttggacggcctcatcattccatccgttgcatgactgtggtacatgacaaagtctggtgtggctataggaacaaaatctatgtggtgcagccaaaggccatgaaaatagagaaatcttttgatgcacatcccaggaaggagagccaagtgcgacactttcgtgggtgggggatggcgtgtgggtctgccattcgcttggattctacgctccgtctctatcatgcacacacttatcaacatctacaggatgtggacattgagccttatgtaagcaaaatgttaggtactggaaaactgggcttctcttttgtgagaattacagctcttatggtgtcttgtaatcgtttgtgggtggggacaggaaatggtgtcattatctccatcccattgacagaaacaaataaaacctcaggtgtaccaggaaatcgtcctggaagtgtaatccgtgtatatggtgatgaaaacagtgataaagtgactccagggacatttataccctattgttcaatggcacatgcacagctttgcttccatgggcaccgggatgctgtgaaattctttgtggcagtcccaggtcaagtcatcagcccacaaag

SEQ ID NO: 4 - DNA, 1586 bp, Homo sapiens
  misc_feature: Incyte ID No: 567938
gaattcctgccactcttcctgcaacggcccaggagctcagagctccacatctgaccttctagtcatgaccaggaccagggcagcactcctcctgttcacagccttagcaacttctctaggtttcaacttggacacagaggagctgacagccttccgtgtggacagcgctgggtttggagacagcgtggtccagtatgccaactcctgggtggtggttggagccccccaaaagataacagctgccaaccaaacgggtggcctctaccagtgtggctacagcactggtgcctgtgagcccatcggcctgcaggtgcccccggaggccgtgaacatgtccctgggcctgtccctggcgtctaccaccagcccttcccagctgctggcctgcggccccaccgtgcaccacgagtgcgggaggaacatgtacctcaccggactctgcttcctcctgggccccacccagctcacccagaggctcccggtgtccaggcaggagtgcccaagacaggagcaggacattgtgttcctgatcgatggctcaggcagcatctcctcccgcaactttgccacgatgatgaacttcgtgagagctgtgataagccagttccagagacccagcacccagttttccctgatgcagttctccaacaaattccaaacacacttcactttcgaggaattcaggcgcagctcaaaccccctcagcctgttggcttctgttcaccagctgcaagggtttacatacacggccaccgccatccaaaatgtcgtgcaccgattgttccatgcctcatatggggcccgtagggatgccgccaaaattctcattgtcatcactgatgggaagaaagaaggcgacagctgggattataaggatgtcatccccatggctgatgcagcaggcatcatccgctatgcaattggggttggattagcttttcaaaacagaaattcttggaaagaattaaatgacattgcatcgaagccctcccaggaacacatatttaaagtggaggactttgatgctctgaaagatattcaaaaccaactgaaggagaagatctttgccattgagggtacggagaccacaagcagtagctccttcgaattggagatggcacaggagggcttcagcgctgtgttcacacctgatggccccgttctgggggctgtggggagcttcacctggtctggaggtgccttcctgtaccccccaaatatgagccctaccttcatcaacatgtctcaggagaatgtggacatgagggactcttacctgggttactccaccgagctggcctcccgcgttgggcaacattgctggctggaagggaggagcgccctctagggagggacatggccccggtgcggctgcagctcacccagccccaggggcagaagagacccaaccacttctattttttgaggctatgaatatagtacctgaaaaaatgccaagacatgattatttttttaaaaagcgtactttaaatgtttgtgttaataaattaaaacatgcacaaaaagatgcatctaccgccttgggaaatatgtcaaaggtctaaaaataaaaaagccttctgtgg

SEQ ID NO: 5 - DNA, 4879 bp, Homo sapiens
  misc_feature: Incyte ID No: 351122.2
  unsure 2532-2583: a, t, c, g, or other
cgccgcgggaggcggacgagatgcgagcgcggccgcggccccggccgctctgggcgactgtgctggcgctgggggcgctggcgggcgttggcgtaggagggcccaacatctgtaccacgcgaggtgtgagctcctgccagcagtgcctggctgtgagccccatgtgtgcctggtgctctgatgaggccctgcctctgggctcacctcgctgtgacctgaaggagaatctgctgaaggataactgtgccccagaatccatcgagttcccagtgagtgaggcccgagtactagaggacaggcccctcagcgacaagggctctggagacagctcccaggtcactcaagtcagtccccagaggattgcactccggctccggccagatgattcgaagaatttctccatccaagtgcggcaggtggaggattaccctgtggacatctactacttgatggacctgtcttactccatgaaggatgatctgtggagcatccagaacctgggtaccaagctggccacccagatgcgaaagctcaccagtaacctgcggattggcttcggggcatttgtggacaagcctgtgtcaccatacatgtatatctccccaccagaggccctcgaaaacccctgctatgatatgaagaccacctgcttgcccatgtttggctacaaacacgtgctgacgctaactgaccaggtgacccgcttcaatgaggaagtgaagaagcagagtgtgtcacggaaccgagatgccccagagggtggctttgatgccatcatgcaggctacagtctgtgatgaaaagattggctggaggaatgatgcatcccacttgctggtgtttaccactgatgccaagactcatatagcattggacggaaggctggcaggcattgtccagcctaatgacgggcagtgtcatgttggtagtgacaatcattactctgcctccactaccatggattatccctctttggggctgatgactgagaagctatcccagaaaaacatcaatttgatctttgcagtgactgaaaatgtagtcaatctctatcagaactatagtgagctcatcccagggaccacagttggggttctgtccatggattccagcaatgtcctccagctcattgttgatgcttatgggaaaatccgttctaaagtagagctggaagtgcgtgacctccctgaagagttgtctctatccttcaatgccacctgcctcaacaatgaggtcatccctggcctcaagtcttgtatgggactcaagattggagacacggtgagcttcagcattgaggccaaggtgcgaggctgtccccaggagaaggagaagtcctttaccataaagcccgtgggcttcaaggacagcctgatcgtccaggtcacctttgattgtgactgtgcctgccaggcccaagctgaacctaatagccatcgctgcaacaatggcaatgggacctttgagtgtggggtatgccgttgtgggcctggctggctgggatcccagtgtgagtgctcagaggaggactatcgcccttcccagcaggacgaatgcagcccccgagagggtcagcccgtctgcagccagcggggcgagtgcctctgtggtcaatgtgtctgccacagcagtgactttggcaagatcacgggcaagtactgcgagtgtgacgacttctcctgtgtccgctacaagggggagatgtgctcaggccatggccagtgcagctgtggggactgcctgtgtgactccgactggaccggctactactgcaactgtaccacgcgtactgacacctgcatgtccagcaatgggctgctgtgcagcggccgcggcaagtgtgaatgtggcagctgtgtctgtatccagccgggctcctatggggacacctgtgagaagtgccccacctgcccagatgcctgcacctttaagaaagaatgtgtggagtgtaagaagtttgaccggggagccctacatgaccgaaaatacctgcaaccgttactgccgtgacgagattgagtcagtgaaagagcttaaggacactggcaaggatgcagtgaattgtacctataagaatgaggatgactgtgtcgtcagattccagtactatgaagattctagtggaaagtccatcctgtatgtggtagaagagccagagtgtcccaagggccctgacatcctggtggtcctgctctcagtgatgggggccattctgctcattggccttgccgccctgctcatctggaaactcctcatcaccatccacgaccgaaaagaattcgctaaatttgaggaagaacgcgccagagcaaaatgggacacagccaacaacccactgtataaagaggccacgtctaccttcaccaatatcacgtaccggggcacttaatgataagcagtcatcctcagatcattatcagcctgtgccacgattgcaggagtccctgccatcatgtttacagaggacagtatttgtggggagggatttggggctcagagtggggtaggttgggagaatgtcagtatgtggaannnnnnnnnnnnnnnnnnnnnnnnnnnnnnnnnnnnnnnnnnnnnnnnnnnntgtgtgtgggagtgtgtaatttaaaattgtgatgtgtcctgataagctgagctccttagcctttgtcccagaatgcctcctgcagggattcttcctgcttagcttgagggtgactatggagctgagcaggtgttcttcattacctcagtgagaagccagctttcctcatcaggccattgtccctgaagagaagggcagggctgaggcctctcattccagaggaagggacaccaagccttggctctaccctgagttcataaatttatggttctcaggcctgactctcagcagctatggtaggaactgctgggcttggcagcccgggtcatctgtacctctgcctcctttcccctccctcaggccgaaggaggagtcagggagagctgaactattagagctgcctgtgccttttgccatcccctcaacccagctatggttctctcgcaagggaagtccttgcaagctaattctttgacctgttgggagtgaggatgtctgggccactcaggggtcattcatggcctgggggatgtaccagcatctcccagttcataatcacaacccttcagatttgccttattggcagctctactctggaggtttgtttagaagaagtgtgtcacccttaggccagcaccatctctttacctcctaattccacaccctcactgctgtagacatttgctatgagctggggatgtctctcatgaccaaatgcttttcctcaaagggagagagtgctattgtagagccagaggtctggccctatgcttccggcctcctgtccctcatccatagcacctccacatacctggccctgagccttggtgtgctgtatccatccatggggctgattgtatttaccttctacctcttggctgccttgtgaaggaattattcccatgagttggctgggaataagtgccaggatggaatgatgggtcagttgtatcagcacgtgtggcctgttcttctatgggttggacaacctcattttaactcagtctttaatctgagaggccacagtgcaattttattttatttttctcatgatgaggttttcttaacttaaaagaacatgtatataaacatgcttgcattatatttgtaaatttatgtgatggcaaagaaggagagcataggaaaccacacagacttgggcagggtacagacactcccacttggcatcattcacagcaagtcactggccagtggctggatctgtgaggggctctctcatgatagaaggctatggggatagatgtgtggacacattggacctttcctgaggaagagggactgttcttttgtcccagaaaagcagtggctccattggtgttgacatacatccaacattaaaagccacccccaaatgcccaagaaaaaaagaaagacttatcaacatttgttccatgagcagaaaactggagctctggcctcagtgttacagctaaataatctttaattaaggcaagtcactttcttcttcttaaagctgttttctagtttgagaaatgatgggattttagcagccagtcttgaaggtctctttcagtatcaacattctaagatgctgggacttactgtgtcatcaaatgtgcggttaagattctctgggatattgatactgtttgtgtttttagttgggagatctgagagacctggctttggcaagagcagatgtcattccatatcacctttctcaatgaaagtctcattctatcctctctccaaacccgttttccaacatttgttaatagttacgtctctcctgatgtagcacttaagcttcatttagttattatttctttcttcactttgcacacatttgcatccacatattagggaagaggaatccataagtagctgaaatatctattctgtattattgtgttaacattgagaataagccttggaattagatatggggcaatgactgagccctgtctcacccatggattactccttactgtagggaatggcagtatggtagagggataaatagggggcggggagggatagtcatggatccaagaagtccttagaaatagtggcagggaacaggtgtggaagctcatgcctgtaattataaccttcagctactaagacaggtgtggtggctcacgcctgtgattataatcttcagttactaagacagagtccatgagagtgttaatgggacattttctttagataagatgttttatatgaagaaactgtatcaaagggggaagaaaatgtatttaacaggtgaatcaaatcaggaatcttgtctgagctactggaatgaagttca

SEQ ID NO: 6 - DNA, 4249 bp, Homo sapiens
  misc_feature: Incyte ID No: 481379.9
agggccccgccctgtgaagggataggagcctgactgttgcagctgcagtgagtggcggggaagcagcagcggccaggatgaatcccaggtgctctggagctggatggtgaaggtcggcactcttcaccctcccgagccctgcccgtctcggccccatgcccccaccagtcagccccgggccacaggcagtgagcaggcacctgggagccgaggccctgtgaccaggccaaggagacgggcgctccagggtcccagccacctgtcccccccatggagctgaggccctggttgctatgggtggtagcagcaacaggaaccttggtcctgctagcagctgatgctcagggccagaaggtcttcaccaacacgtgggctgtgcgcatccctgggaggcccagcggtggccaacagtgtggcacggaagcatgggttcctcaacctgggccagatcttcggggactattaccacttctggcatcgaggagtgacgaagcggtccctgtcgcctcaccgcccgcggcacagccggctgcagagggagcctcaagtacagtggctggaacagcaggtggcaaagcgacggactaaacgggacgtgtaccaggagcccacagaccccaagtttcctcagcagtggtacctgtctggtgtcactcagcgggacctgaatgtgaaggcggcctgggcgcagggctacacagggcacggcattgtggtctccattctggacgatggcatcgagaagaaccacccggacttggcaggcaattatgatcctggggccagttttgatgtcaatgaccaggaccctgacccccagcctcggtacacacagatgaatgacaacaggcacggcacacggtgtgcgggggaagtggctgcggtggccaacaacggtgtctgtggtgtaggtgtggcctacaacgcccgcattggaggggtgcgcatgctggatggcgaggtgacagatgcagtggaggcacgctcgctgggcctgaaccccaaccacatccacatctacagtgccagctggggccccgaggatgacggcaagacagtggatgggccagcccgcctcgccgaggaggccttcttccgtggggttagccagggccgaggggggctgggctccatctttgtctgggcctcggggaacgggggccgggaacatgacagctgcaactgcgacggctacaccaacagtatctacacgctgtccatcagcagcgccacgcagtttggcaacgtgccgtggtacagcgaggcctgctcgtccacactggccacgacctacagcagtggcaaccagaatgagaagcagatcgtgacgactgacttgcggcagaagtgcacggagtctcacacgggcacctcagcctctgcccccttagcagccggcatcattgctctcaccctggaggccaataagaacctcacatggcgggacatgcaacacctggtggtacagacctcgaagccagcccacctcaatgccaacgactgggccaccaatggtgtgggccggaaagtgagccactcatatggctacgggcttttggacgcaggcgccatggtggccctggcccagaattggaccacagtggccccccagcggaagtgcatcatcgacatcctcaccgagcccaaagacatcgggaaacggctcgaggtgcggaagaccgtgaccgcgtgcctgggcgagcccaaccacatcactcggctggagcacgctcaggcgcggctcaccctgtcctataatcgccgtggcgacctggccatccacctggtcagccccatgggcacccgctccaccctgctggcagccaggccacatgactactccgcagatgggtttaatgactgggccttcatgacaactcattcctgggatgaggatccctctggcgagtgggtcctagagattgaaaacaccagcgaagccaacaactatgggacgctgaccaagttcaccctcgtactctatggcaccgcccctgaggggctgcccgtacctccagaaagcagtggctgcaagaccctcacgtccagtcaggcctgtgtggtgtgcgaggaaggcttctccctgcaccagaagagctgtgtccagcactgccctccaggcttcgccccccaagtcctcgatacgcactatagcaccgagaatgacgtggagaccatccgggccagcgtctgcgccccctgccacgcctcatgtgccacatgccaggggccggccctgacagactgcctcagctgccccagccacgcctccttggaccctgtggagcagacttgctcccggcaaagccagagcagccgagagtccccgccacagcagcagccacctcggctgcccccggaggtggaggcggggcaacggctgcgggcagggctgctgccctcacacctgcctgaggtggtggccggcctcagctgcgccttcatcgtgctggtcttcgtcactgtcttcctggtcctgcagctgcgctctggctttagttttcggggggtgaaggtgtacaccatggaccgtggcctcatctcctacaaggggctgccccctgaagcctggcaggaggagtgcccgtctgactcagaagaggacgagggccggggcgagaggaccgcctttatcaaagaccagagcgccctctgatgagcccactgcccaccccctcaagccaatcccctccttgggcactttttaattcaccaaagtatttttttatcttgggactgggtttggaccccagctgggaggcaagaggggtggagactgtttcccatcctaccctcgggcccacctggccacctgaggtgggcccaggaccagctggggcgtggggagggccgtaccccaccctcagcaccccttccatgtggagaaaggagtgaaacctttagggcagcttgccccggccccggccccagccagagttcctgcggagtgaagaggggcagcccttgcttgttgggattcctgacccaggccgcagctcttgcccttccctgtccctctaaagcaataatggtcccatccaggcagtcgggggctggcctaggagatatctgagggaggaggccacctctccaagggcttctgcaccctccaccctgtcccccagctctggtgagtcttggcggcagcagccatcataggaagggaccaaggcaaggcaggtgcctccaggtgtgcacgtggcatgtggcctgtggcctgtgtcccatgacccacccctgtgctccgtgcctccaccaccactggccaccaggctggcgcagccaaggccgaagctctggctgaaccctgtgctggtgtcctgaccaccctcccctctcttgcacccgcctctcccgtcagggcccaagtccctgttttctgagcccgggctgcctgggctgttggcactcacagacctggagcccctgggtgggtggtggggaggggcgctggcccagccggcctctctggcctcccacccgatgctgctttcccctgtggggatctcaggggctgtttgaggatatattttcactttgtgattatttcactttagatgctgatgatttgtttttgtatttttaatgggggtagcagctggactacccacgttctcacacccaccgtccgccctgctcctccctgggctgccctggccctgaggtgtgggggctgcagcatgttgctgaggagtgaggaatagttgagccccaagtcctgaagaggcgggccagccaggcgggctcaaggaaagggggtcccagtgggaggggcaggctgacatctgtgtttcaagtggggctcgccatgccgggggttcataggtcactggctctccaagtgccagaggtgggcaggtggtggcactgagcccccccaacactgtgccctggtggagaaagcactgacctgtcatgcccccctcaaacctcctcttctgacgtgccttttgcacccctcccattaggacaatcagtcccctcccatctgggagtccccttttcttttctaccctagccattcctggtacccagccatctgcccaggggtgccccctcctctcccatccccctgccctcgtggccagcccggctggttttgtaagatgctgggttggtgcacagtgatttttttcttgtaatttaaacaggcccagcattgctggttctatttaatggacatgagataatgttagaggttttaaagtgattaaacgtgcagactatgcaaaccagaaaacaaaaaaaa

SEQ ID NO: 7 - DNA, 2310 bp, Homo sapiens
  misc_feature: Incyte ID No: 215391.7
  unsure 2015, 2192, 2203: a, t, c, g, or other
gccgcaagtttctggagggagccgctgcgggtctttccctcactcgtcctccgcgcgtcgccgctcttcggttctgctctgtccgccgccatggcccaagctgacatcgcgctgatcggattggccgtcatgggccagaacttaattctgaacatgaatgaccacggctttgtggtctgtgcttttaataggactgtctccaaagttgatgatttcttggccaatgaggcaaagggaaccaaagtggtgggtgcccagtccctgaaagagatggtctccaagctgaagaagccccggcggatcatcctcctggtgaaggctgggcaagctgtggatgatttcatcgagaaattggtaccattgttggatactggtgacatcatcattgacggaggaaattctgaatatagggacaccacaagacggtgccgagacctcaaggccaagggaattttatttgtggggagcggagtcagtggtggagaggaaggggcccggtatggcccatcgctcatgccaggagggaacaaagaagcgtggccccacatcaagaccatcttccaaggcattgctgcaaaagtgggaactggagaaccctggctgtgactgggtgggagatgagggagcaggccacttcgtgaagatggtgcacaacgggatagagtatggggacatgcagctgatctgtgaggcataccacctgatgaaagacgtgctggggcatgggcgcaggacgagatgggcccagggcctttgaggattggaataagacagagctagactcattcctgattgaaatcacagccaatattctcaagttccaagataccgatggcaaacacctgctgccaaagatcagggacagcgcggggcagaagggcacagggaagtggaccgccatctccgccctggaatacggcgtacccgtcaccctcattggagaagctgtctttgctcggtgcttatcatctctgaaggatgagagaattcaagctagcaaaaagctgaagggtccccagaagttccagtttgatggtgataagaaatcattcctggaggacattcggaaggcactctacgcttccaagatcatctcttacgctcaaggctttatgctgctaaggcaggcagccaccgagtttggctggactctcaattatggtggcatcgccctgatgtggagagggggctgcatcattagaagtgtattcctaggaaagataaaggatgcatttgatcgaaacccggaacttcagaacctcctactggacgacttctttaagtcagctgttgaaaactggccaggactcctggcggcgggcagtcagcactggggtccaggctggcattcccatgccctgttttaccactgccctctccttctatgacgggtacagacatgagatgcttccagccagcctcatccaggctcagcgggattacttcggggctcacacctatgaactcttggccaaaccagggcagtttatccacaccaactggacaggccatggtggcaccgtgtcatcctcgtcatacaatgcctgatcatgctgctcctgtcaccctccacgattccacagaccaggacattccatgtgcctcatggcactgccacctggccctttgccctattttctgttcagttttttaaaagtgttgtaagagactcctgaggaagacacacagtttatttgtaaagtagctctgtgagagccaccatgccctctgcccttgcctcttgggactgaccaggagctgctcatgtgcgtgagagtgggaaccatctccttgcggcagtggcttccgcgtgccccgtgtgctggtgcggttcccatcacgcagacaggaagggtgtttgcgcactctgatcaactggaacctctgtatcatgcggctgaattccctttttcctttactcaataaaagctacatcagactgatgctctttctccagattcttagtctcacctcggccacatggagccattatccccattggcagaaagattttnctttaaaaaaaaagactagaataacacaagaaaccacatttaggattatgcttcactcagaggaggcaggcagggaggacacaccaggggctttaatacactgggcatgttttctttctccaattgggcaatgggtacatggacgttcactgtaacgtgctttttctttcgtctttnttttttttttntttttttgctcctggcaagctgtgcgtgacattctttatggctttttgtatgtcaaatacttcatactaaactttctagagaattaaactttaatgatgggaaccac

SEQ ID NO: 8 - DNA, 1849 bp, Homo sapiens
  misc_feature: Incyte ID No: 243812.1
gggcgctgggagcccgttgggccgcgaacgcagccgccacgccggggccgccgagatcgggtgcccgggatgagcctcatccggaaaaagggcttctacaagcaggacgtcaacaagaccgcctgggagctgcccaagacctacgtgtccccgacgcacgtcggcagcggggcctatggctccgtgtgctcggccatcgacaagcggtcaggggagaaggtggccatcaagaagctgagccgaccctttcagtccgagatcttcgccaagcgcgcctaccgggagctgctgctgctgaagcacatgcagcatgagaacgtcattgggctcctggatgtcttcaccccagcctcctccctgcgcaacttctatgacttctacctggtgatgcccttcatgcagacggatctgcagaagatcatggggatggagttcagtgaggagaagatccagtacctggtgtatcagatgctcaaaggccttaagtacatccactctgctggggtcgtgcacagggacctgaagccaggcaacctggctgtgaatgaggactgtgaactgaagattctggattttgggctggcgcgacatgcagacgccgagatgactggctacgtggtgacccgctggtaccgagcccccgaggtgatcctcagctggatgcactacaaccagacagtggacatctggtctgtgggctgtatcatgggcagagatgctgacagggaaaactctgttcaaggggaaagattacctggaccagctgacccagatcctgaaagtgaccggggtgcctggcacggagtttgtgcagaagctgaacgacaaagcggccaaatcctacatccagtccctgccacagacccccaggaaggatttcactcagctgttcccacgggccagcccccaggctgcggacctgctggagaagatgctggagctagacgtggacaagcgcctgacggccgcgcaggccctcacccatcccttctttgaacccttccgggaccctgaggaagagacggaggcccagcagccgtttgatgattccttagaacacgagaaactcacagtggatgaatggaagcagcacatctacaaggagattgtgaacttcagccccattgcccggaaggactcacggcgccggagtggcatgaagctgtagggactcatcttgcatggcaccgccggccagacactgcccaaggaccagtatttgtcactaccaaactcagcccttcttggaatacagcctttcaagcagaggacagaagggtccttctccttatgtgggaaatgggcctagtagatgcagaattcaaagatgtcggttgggagaaactagctctgatcctaacaggccacgttaaactgcccatctggagaatcgcctgcaggtggggccctttccttcccgccagagtggggctgagtgggcgctgagccaggccgggggcctatggcagtgatgctgtgttggtttcctagggatgctctaacgaattaccaacaaacctggtggattgaaacagcagaacttgattcccttacagttctggaggctggaaatctgggatggaggtgttggcagggctgtggtccctttgaaggctctggggaagaatccttccttggctctttttagcttgtggcggcagtgggcagtccgtggcattccccagcttatgctgcatcactccagtctctgtctcttctgttctctcctcttttaacaacagtcattggatttagggcccaccctaatcctgtgtgatcttatcttgatccttattaattaaacctgcaaatactctagttccaaataaagtcccattctcaggtaaaa

SEQ ID NO: 9 - DNA, 1327 bp, Homo sapiens
  misc_feature: Incyte ID No: 1085755.1
gtgcggtgtctggtttattcaaagtggctgtcagaggcccgaccatggagcaggaaccaaatagttgggagctgtggggctgaacagggcagggatttccaggtatcagaaggtaaaaggaggtcagctgagcagccacagcagcattagggccaggctaagcaggaaaggccaggctgcccagggcccagccccactcatggctgcagcatagaacctcgccacctcctcattggggttgccctgggctgggtcgaaccacatctggatgcagcggccactccctcggctgtagttgctgaccttgtaggagtgagtccagatttcattgcacagaacagtgggtgtggggaagtagaaatggaaaggttggcaggcagctcccactgcgcacttgttaaaccctgaagtccagttccagcccttgtgccagttgctcttgcaggtgtaggaggtgcgacaatcttcccaccattgctcacagtcctctttgcacaggggcacgttcagtacccgctctttgcgccagctctgatccacctgctggatccagggccccaagttgggggagcactcgtagaggcaggtgtcctggatgaaatgccgtttgcaggcaggtgccatctctccacagtggttccagttgaatctatataggtaggaaacatccttatgggcttcctggctggtgttggtagaacagcaggcattcttcctccagggtcgacactgctcatgcaacttgtcctcggggcctggcttttccttgtggtgcttggcgttcatgcagacattgagaagctcagtcctggcccatgcaatccttgtctgagcctcccctactacagccacccacactagaaggagcagcagctgtgttgtcatccgctgagccatgtctgtcccttgagggccacgccggagaaatctgtactctcagggaataccaggtgatcctttgggttcagttcctcggcgggccctaactgttagagcacagggttcccgttcaacctgtcccgaccccagccctcactccaccttctccttggccttgggggaaagagaagcaaactatcttgaggcttagctttctcctgcaaggattaaatgtaagaagggggaaatcaacaaatgatagccagtttaatctttgtggaatcatttcagcacagatgaggccatgccccaagtcacacagtagggaccacccaagttcaggccagagctcttttggcctttgccccctgcaccttcagagtgctgaggctctcatgggtgcggccaacacacagtgctggagatgggggctgagaaaatcctttcc

SEQ ID NO: 10 - DNA, 6568 bp, Homo sapiens
  misc_feature: Incyte ID No: 347809.3
  unsure 2367-2399: a, t, c, g, or other
tgtgtttggtgaaagacgatgctaggcctggggtacagcctgaagtgtgacacccagacgacaaacctgggggcctctggtgcttctcttcagcaggtgcccggggaatggacctgccgattctgtgggttgcaagtgtccacagcctgaatcttgaggtccctggtccatgaaggggtctgaatgactcctgatgttgctgtcaaagcattggacagacagggatgccaggccccttgccacaggcccgggcaggtgggagccggctcgtggatgaggaagcagagattgtgtctgagacatacaggtggtccctcatcagctgcaggatgcttctcttttgtcccccaaacaaagcaaggagatggccaccaaggagaagctgcagtgtctgaaagatttccacaaggacatcctgaagccctcaccagggaagagcccaggcacgcggcctgaggacgaggctgagggaaaacctccgcagagggagaagtggtctagcaagatcgactttgtgctctctgtggctggcggcttcgtgggcttgggcaacgtctggcgcttcccgtacctctgctacaagaatggtggaggtgcgtttctcataccgtattttattttcctgtttgggagcggcctgcctgtgtttttcttggagatcatcataggccagtacacctctgaagggggcatcacctgctgggaaaagatctgccccttgttctctggtatcggctatgcctccgttgtaattgtgtccctcctgaatgtctactacatcgtcatcctggcctgggccacatactacctgttccagtccttccagaaggagctgccctgggcacactgcaaccacagctggaacacacctcactgcatggaggacaccatgcgcaagaacaagagtgtctggatcaccatcagctccaccaacttcacctcccctgtcatcgagttctgggagcgcaacgtgctgagcttgtcccctggaatcgaccacccaggctctctgaaatgggacctcgctctctgccttcttttagtctggctagtgtgtttcttctgcatctggaagggcgtcaggtccactgggaaggtcgtctacttcacagccacttttccattcgccatgctcctggtgctgctggtccgagggctgacgctgccgggcgcgggcgcaggcatcaagttctatctgtatcctgacatcacccgccttgaggacccacaggtgtggattgacgctgggactcagatattcttctcttatgccatctgcctgggggctatgacctcgctggggagctacaacaagtacaagtataactcgtacagggactgtatgctgctgggatgcctgaacagtggtaccagttttgtgtctggcttcgcaattttttccatcctgggcttcatggcacaagagcaaggggtggacattgctgatgtggctgagtcaggtcctggcctggccttcattgcctacccaaaagctgtgacaatgatgccgctgcccacattttggtccattcttttttttattatgcttctcttgcttggactggatagccagtttgttgaagttgaaggacagatcacatccttggttgatctttacccatccttcctaaggaagggttatcgtcgggaaatcttcatcgccttcgtgtgtagcatcagctacctgctggggctgacgatggtgacggagggtggcatgtatgtgtttcagctctttgactactatgcagctagcggtgtatgccttttgtgggttgcattctttgaatgttttgttattgcctggatatatggaggtgataacctttatgatggtattgaggacatgattggctatcggcccgggccctggatgaagtacagctgggctgtgatcactccagttctctgtgttggatgtttcatcttctcgctcgtcaagtacgtacccctgacctacaacaaaacatacgtgtccccaacttgggccattgggctgggctggagcctggccctttcctccatgctctgcgttcccttggtcatcgtcatccgcctctgccagactgaggggccgttccttgtgagagtcaagtacctgctgaccccaagggaacccaaccgctgggctgtggagcgcgagggagccacaccttacaactctcgcaccgtcatgaacggcgctctcgtgaaaccgacccacatcattgtggagaccatgatgtgagctctctcgggtcgacggggccggcggctttcctgctgtttactaacattagattcacataggaccaggtttacagagctttatatttgcactaggatttttttttttttgtaattgtcacagaaaatgtaattgtgggnnnnnnnnnnnnnnnnnnnnnnnnnnnnnnnnncgtgtgtgtgtgttttgttttgatttgggggatattttgtacaaaaagaaaacccacgggaagatgtccgtggagaggcagagctttcatactgaattagatgtattttatgggaatttggtacatttctctagtgtatttattttattacatataagtatatatacacttagagattgtcatatacttttaccacttgaattgatcttcttgccagcaatagatctcattttcaaaagcaattcttcggtgctgtgtagctggcagaaagttctgtccagtaaacgcaggatggaattttcctgggactctacacccatcttaaggtggtataccttccaaatcctggttcagatggaagaaatagcaggagagaggacccattagctggcagacccagggggaagaaaggagggctgtgaggagatacctcattaaacttggcttagtgaagaagagagatgccaaaggaatgaaccaacccttcacataaaggagactggctgaagctgaatgaggaggccctatagcagaagtctgattctaagagcagtagaaacttgtaccagaagcaaaatcccacttttaattttgagatggtgagtggatagtcagtagaccgtcagaaccactggccagagagggagctgctagagatccaagaaggctggcaggaatgaggctcacaactcagcctcgcaagaggtggcagaggcacaggaggccacagtccttcctggggcattccaggcagagaaggagcagaggctctcccggcaggagctggggtctcagggctcagatgagtctgttgcatttgaatggggtcatagcaggttctggtcattccccaagcaacatctcagcatctcttaaagttgcctgcaggaatgaagcatgacatacctgttgagggactaggggagtggtggggaggtgagtggaccaaaggatataggccccaggcatgcagatgggcccggtgtcggggaggggtgctttctttcctcatctcccccactccccactctcagcctgggagactcctgccaagccctcattaaagatgccaccctgggctgccctggcacctagcaaggcacaccaagaacagcttttgagtcgtatcctccactggggaagtgctcccagttcagaacaagggcagcccgtggtgctgacctaggatataacaaagctcttcacttcaaaacccctgcaatagctgggtttacagacatttaccacctgcggacccaaaagagaaggcctaggagagttttctagaaggttgggattgtcagggtcctggcccctcagaactggcttgatcaagggccttatgtggagcagaggttgtctctgaaccaggagagaaggtactatacctttcaaatccccagggcagacacacccccacccagcccctatttggacctaaactgtgccatttgaacagtcacttccaagctcagtctaaatgaaaccgaaacgtgaccacgcacaaaggcagtcactgcctcgaggggtgcagaccgcagaattttcacagcaggggctcttggaactctggaaacccccttcttaaatttgggaggaggagtatgcctttggtgtccccctcccaaggggcaattctgaaccccatctttggcaggcatacatatttcactgtttccaaagctatctactctgccaaacaacacccagtcctattccaaactctcaacaattctatcttgttcctgtttttctatgtatttatggttgccgtttgtgtctgatttgattttactgttttttccctgattttatggagtagcattgtgacctgttttcctttgtcttatataactttagtaaactaaccactgtcaatgattgagggcaggtggcacgtggggaagaggggacttggcacgcagtggctacctgggcatttgtggtcatttcagtttccatctccccagcgggggctccctgggtgaaaggccacagtattttgggttggtaggcaaattgcaacattctggacatggcctgaggaaggcctcttcttataagattctcagaccaaattctagaccaaagacacaggcagaccaagtccccaggccccgcctggaaggaagtcgttcctcaactctccccaaggcacctgtctccaatcagagccctctcgcccagccagccctggctctgtgtgcagagcatagctctgcgagtacctgtgtaataatgctcaaccttcatgtctccgtataaacgaaactttccatgagagctcatgactctggtccacctgtctatagagaatgggcaaagtccttcacctgctttctgcttgggatgggtcagaaatgctgatgcccgcacataggcccagccagccagatctggaaaggaagcgagggggttgtttaaatcaattttttaagatgaagaagtgggagacactgcgttgagatgggccatgctagggccacagagatttcctgacggtcagggagagaagggcctccagggtcccctaacccaacgcccttgttgtaaatgaggtaactgaggctcagggaggcactgtgagccaggaatggattttcttgaaacagctctagctgcaggttctccgaggtaggtgcagggaatggtgagtgtctaaccagggctacatccagcaacatcctcaaggtcttcctgacaaccaaagacaagcctttatggaaaaggaaatgcgctcccctccatgttcagggatgaggggagcagcagcagccacactcccaccatcctcacagaattcctggacccatgcggtggctccgtgagctgggtgactccagcctcacctgcacaccccagccctgcacggggccctccttcctcccagcagcccttggtgagctaggaattgagatccctgtttgtgaaagagggaactgaggtgcagagaagccagaggtgtgccagatccttaggcaggatttagatgaagtcgccctggctccagactgaccccgaggctctgcggggagtttccaggcagcaggaagtggccttggatgctctccttccaggacagcataacccctgggccatgtgcagctccttcactgccccctggatccccagcatacccccaaagacagtggggaaacacaaggggagagcacagcatggcccctccagcccacttcagggcactcttgtatcacccgggtaccgccacactggtcccccacccagccagcatctcccagcacagcccctctccctggggaaatgctctgggtagccagtctaaaggcagaggcacctaactgctccccgcagcccaccccacccaagattcagacacaagccaggaaaggacccaagagaaaatccttcaaggtggcctgaggtcccatccctccctcagacccatgtggtcccaggccaggctgcctgggacacggtaaataccactgtgtgcaaaaatcgaagtacaaaaccacaagactaaacaaaacaaacccagagagccaaacttgtagaggtgggcagtccagaaagcagggggcagccctccccctttccttctctccctgatcctcagaatatatattgttgtaataggaagcatttttgcattgttctcttgtgggtgtcactacagacatgttctggcgtgttctccgagggatggagcatcctgttatatatttgacttcaaattgagatgttggcttcattttttttttttacccaattaatctcccaatccctagcaactgtgactctgtatttagcacaagagaaagctgagaatgtgggtcttgcctccttccagaaatatgtctggctcatcaggacatttttttaaaacttcaaaatatttttaagatattttaaacttttataaaaaaaaaatcaaccaacaagagacttttctgaggaggaacatttgtatttgaacaagatccttggtgtgtagttcagtcttgcagtatacaagcttttgtgtataaatgttttatgatatgattccctgtgttttgcaggggtttttttctcttttgctttttagataaatatgtatatcaatattttaaattcatctttgctttttttagaggagtttgtaatcaccttataacatgaaaataaacatttcctttttaacatcc

SEQ ID NO: 11 - DNA, 611 bp, Homo sapiens
  misc_feature: Incyte ID No: 331734.4
gacagcagcaggcccggggcaggtctgcagcatcacaactgctaggctgcccaacactctccatcctagctcagaagggactcccactggaagctcttgtcccaggaacttacccaggctccaggacagcctggcctggctcccagaccactgctgtgcttctctctcggcagatcggtgggggcaggaacatggaccaccacatcctgcatgtggctgtggatgtcatcagggagtctcgggagatgcggctgcagcccttcaatgagtaccgcaagaggtttggcatgaaaccctacacctccttccaggagctcgtaggagagaaggagatggcagcagagttggaggaattgtatggagacattgatgcgttggagttctaccctggactgcttcttgaaaagtgccatccaaactctatctttggggagagtatgatagagattggggctcccttttccctcaagggtctcctagggaatcccatctgttctccggagtactggaagccgagcacatttggcggcgaggtgggctttaacattgtcaagacggccacactgaagaagctggtctgcctcaacaccaagacctgtccctacgtttcc

SEQ ID NO: 12 - DNA, 1283 bp, Homo sapiens
  misc_feature: Incyte ID No: 116840.38
  unsure 1273: a, t, c, g, or other
ggcggggctagccggatccgctgactgatggtggggcgcaagcagggttggagctgcaggcttacgggaataaaaccgggaaagccggcctgggccgaggccactggtgcatatgttcccgggagggataagccagacctgccaacctggaagaggaatttccgctctgccctcaaccgcaaagaagggttgcgtttagcagaggaccggagcaaggaccctcacgacccacataaaatctacgagtttgtgaactcaggagttggggacttttcccagccagacacctctccggacaccaatggtggaggcagtacttctgatacccaggaagacattctggatgagttactgggtaacatggtgttggccccactcccagatccgggacccccaagcctggctgtagcccctgagccctgccctcagcccctgcggagccccagcttggacaatcccactcccttcccaaacctggggccctctgagaacccactgaagcggctgttggtgccgggggaagagtgggagttcgaggtgacagccttctaccggggccgccaagtcttccagcagaccatctcctgcccggagggcctgcggctggtggggtccgaagtgggagacaggacgctgcctggatggccagtcacactgccagaccctggcatgtccctgacagacaggggagtgatgagctacgtgaggcatgtgctgagctgcctgggtgggggactggctctctggcgggccgggcagtggctctgggcccagcggctggggcactgccacacatactgggcagtgagcgaggagctgctccccaacagcgggcatgggcctgatggcgaggtccccaaggacaaggaaggaggcgtgtttgacctggggcccttcattgtaggctcctgggcccccagatctgattaccttcacggaaggaagcggacgctcaccacgctatgccctctggttctgtgtgggggagtcatggccccaggaccagccgtggaccaagaggctcgtgatggtcaaggttgtgcccacgtgcctcagggccttggtagaaatggcccgggtagggggtgcctcctccctggagaatactgtggacctgcacatttccaacagccacccactctccctcacctccgaccagtacaaggcctacctgcaggacttggtggagggcatggatttccagggccctggggagagctgagccctcgctcctcatggtgtgcctccaaccccctgtttcccaacaactcanccaataaact

SEQ ID NO: 13 - DNA, 4361 bp, Homo sapiens
  misc_feature: Incyte ID No: 903565.11
cgcggcggtgttggcggcggcggtggcggcggcggcggcgcttccccggcgcggagcggctttaaaaggcggcactccaccccccggcgcactcgcagctcgggcgccgcgcgagcctgtcgccgctatgcctccgcgcgcgccgcctgcgcccgggccccggccgccgccccgggccgccgccgccaccgacaccgccgcgggcgcggggggcgcggggggcgcggggggcgccggcgggcccgggttccggccgctcgcgccgcgtccctggcgctggctgctgctgctggcgctgcctgccgcctgctccgcgcccccgccgcgccccgtctacaccaaccactgggcggtgcaagtgctgggcggcccggccgaggcggaccgcgtggcggcggcgcacggctacctcaacttgggccagattggaaacctggaagattactaccatttttatcacagcaaaacctttaaaagatcaaccttgagtagcagaggccctcacaccttcctcagaatggacccccaggtgaaatggctccagcaacaggaagtgaaacgaagggtgaagagacaggtgcgaagtgacccgcaggccctttacttcaacgaccccatttggtccaacatgtggtacctgcattgtggcgacaagaacagtcgctgccggtcggaaatgaatgtccaggcagcgtggaagaggggctacacaggaaaaaacgtggtggtcaccatccttgatgatggcatagagagaaatcaccctgacctggccccaaattatgattcctacgccagctacgacgtgaacggcaatgattatgacccatctccacgatatgatgccagcaatgaaaataaacacggcactcgttgtgcgggagaagttgctgcttcagcaaacaattcctactgcatcgtgggcatagcgtacaatgccaaaataggaggcatccgcatgctggacggcgatgtcacagatgtggtcgaggcaaagtcgctgggcatcagacccaactacatcgacatttacagtgccagctgggggccggacgacgacggcaagacggtggacgggcccggccgactggctaagcaggctttcgagtatggcattaaaaagggccggcagggcctgggctccattttcgtctgggcatctgggaatggcgggagagagggggactactgctcgtgcgatggctacaccaacagcatctacaccatctccgtcagcagcgccaccgagaatggctacaagccctggtacctggaagagtgtgcctccaccctggccaccacctacagcagtggggccttttatgagcgaaaaatcgtcaccacggatctgcgtcagcgctgtaccgatggccacactgggacctcagtctctgcccccatggtggcgggcatcatcgccttggctctagaagcaaacagccagttaacctggagggacgtccagcacctgctagtgaagacatcccggccggcccacctgaaagcgagcgactggaaagtgaacggcgcgggtcataaagttagccatttctatggatttggtttggtggacgcagaagctctcgttgtggaggcaaagaagtggacagcagtgccatcgcagcacatgtgtgtggccgcctcggacaagagacccaggagcatccccttagtgcaggtgctgcggactacggccctgaccagcgcctgcgcggagcactcggaccagcgggtggtctacttggagcacgtggtggttcgcacctccatctcacacccacgccgaggagacctccagatctacctggtttctccctcgggaaccaagtctcaacttctggcaaagaggttgctggatctttccaatgaagggtttacaaactgggaattcatgactgtccactgctggggagaaaaggctgaagggcagtggaccttggaaatccaagatctgccatcccaggtccgcaacccggagaagcaagggaagttgaaagaatggagcctcatactgtatggcacagcagagcacccgtaccacaccttcagtgcccatcagtcccgctcgcggatgctggagctctcagccccagagctggagccacccaaggctgccctgtcaccctcccaggtggaagttcctgaagatgaggaagattacacagctcaatccaccccaggctctgctaatattttacagaccagtgtgtgccatccggagtgtggtgacaaaggctgtgatggccccaatgcagaccagtgcttgaactgcgtccacttcagcctggggagtgtcaagaccagcaggaagtgcgtgagtgtgtgccccttgggctactttggggacacagcagcaagacgctgtcgccggtgccacaaggggtgtgagacctgctccagcagagctgcgacgcagtgcctgtcttgccgccgcgggttctatcaccaccaggagatgaacacctgtgtgaccctctgtcctgcaggattttatgctgatgaaagtcagaaaaattgccttaaatgccacccaagctgtaaaaagtgcgtggatgaacctgagaaatgtactgtctgtaaagaaggattcagccttgcacggggcagctgcattcctgactgtgagccaggcacctactttgactcagagctgatcagatgtggggaatgccatcacacctgcggaacctgcgtggggccaggcagagaagagtgcattcactgtgcgaaaaacttccacttccacgactggaagtgtgtgccagcctgtggtgagggcttctacccagaagagatgccgggcttgccccacaaagtgtgtcgaaggtgtgacgagaactgcttgagctgtgcaggctccagcaggaactgtagcaggtgtaagacgggcttcacacagctggggacctcctgcatcaccaaccacacgtgcagcaacgctgacgagacattctgcgagatggtgaagtccaaccggctgtgcgaacggaagctcttcattcagttctgctgccgcacgtgcctcctggccgggtaagggtgcctagctgcccacagagggcaggcactcccatccatccatccgtccaccttcctccagactgtcggccagagtctgtttcaggagcggcgccctgcacctgacagctttatctccccaggagcagcatctctgagcacccaagccaggtgggtggtggctcttaaggaggtgttcctaaaatggtgatatcctctcaaatgctgcttgttggctccagtcttccgacaaactaacaggaacaaaatgaattctgggaatccacagctctggctttggagcagcttctgggaccataagtttactgaatcttcaagaccaaagcagaaaagaaaggcgcttggcatcacacatcactcttctccccgtgcttttctgcggctgtgtagtaaatctccccggcccagctggcgaaccctgggccatcctcacatgtgacaaagggccagcagtctacctgctcgttgcctgccactgagcagtctggggacggtttggtcagactataaataagataggtttgagggcataaaatgtatgaccactggggccggagtatctatttctacatagtcagctacttctgaaactgcagcagtggcttagaaagtccaattccaaagccagaccagaagattctatcccccgcagcgctctcctttgagcaagccgagctctccttgttaccgtgttctgtctgtgtcttcaggagtctcatggcctgaacgaccacctcgacctgatgcagagccttctgaggagaggcaacaggaggcattctgtggccagccaaaaggtaccccgatggccaagcaattcctctgaacaaaatgtaaagccagccatgcattgttaatcatccatcacttcccattttatggaattgcttttaaaatacatttggcctctgcccttcagaagactcgtttttaaggtggaaactcctgtgtctgtgtatattacaagcctacatgacacagttggatttattctgccaaacctgtgtaggcattttataagctacatgttctaatttttaccgatgttaattattttgacaaatatttcatatattttcattgaaatgcacagatctgcttgatcaattcccttgaatagggaagtaacatttgccttaaattttttcgacctcgtctttctccatattgtcctgctcccctgtttgacgacagtgcatttgccttgtcacctgtgagctggagagaacccagatgttgtttattgaatctacaactctgaaagagaaatcaatgaagcaagtacaatgttaaccctaaattaataaaagagttaacatccc

SEQ ID NO: 14 - DNA, 3132 bp, Homo sapiens
  misc_feature: Incyte ID No: 903565.8
  unsure 2887-2906, 2986-3010: a, t, c, g, or other
tttttaacccaaaacatggtttctctgattatcgacagtgcaaaggatgcatgctgagcgcgacatgggcagggacgtcccgcgtagtccaccaatggggtgtgagcaccttgctattctgcttcccatcttatcccgctgctgcacggtgtctgcccacagcagggacccaacaaatatgcatccagtgaacaaagggacgaaggcccctcagcagctctgtaaatgggctcctgtccacagtggggtgatgcaacatgccctccccggcccctggggaagatgctgacagactctgccctccaggcactcctttgctggacacagttgcctgccgttccccgccaggaggaccgtaccttcgacacactttgtggggcaagcccggcatctcttctgggtagaagccctcaccacaggctggcacacacttccagtcgtggaagtggaagtttttcgcacagtgaatgcactcttctctgcctggccccacgcaggttccgcaggtgtgatggcattccccacatctgatcagctctgagtcaaagtaggtgcctggctcacagtcaggaatgcagctgccccgtgcaaggctgaatccttctttacagacagtacatttctcaggttcatccacgcactttttacagcttgggtggcatttaaggcaatttttctgactttcatcagcataaaatcctgcaggacagagggtcacacaggtgttcatctcctggtggtgatagaacccgcggcggcaagacaggcactgcgtcgcagctctgctggagcaggtctcacaccccttgtggcaccggcgacagcgtcttgctgctgtgtccccaaagtagcccaaggggcacacactcacgcacttcctgctggtcttgacactccccaggctgaagtggacgcagttcaagcactggtctgcattggggccatcacagcctttgtcaccacactccggatggcacacactggtctgtaaaatattagcagagcctggggtggattgagctgtgtaatcttcctcatcttcaggaacttccacctgggagggtgacagggcagccttgggtggctccagctctggggctgagagctccagcatccgcgagcgggactgatgggcactgaaggtgtggtacgggtgctctgctgtgccatacagtatgaggctccattctttcaacttcccttgcttctccgggttgcggacctgggatggcagatcttggatttccaaggtccactgcccttcagccttttctccccagcagtggacagtcatgaattcccagtttgtaaacccttcattggaaagatccagcaacctctttgccaaaagttgagacttggttcccgagggagaaaccaggtagatctggaggtctcctcggcgtgggtgtgagatggaggtgcgaaccaccacgtgctccaagtagaccacccgctggtccgagtgctccgcgcaggcgctggtcagggccgtagtccgcagcacctgcactaaggggatgctcctgggtctcttgtccgaggcggccacacacatgtgctgcgatggcactgctgtccacttctttgcctccacaacgagagcttctgcgtccaccaaaccaaatccatagaaatggctaactttatgacccgcgccgtttactttccagtcgctcgctttcaggtgggccggccgggatgtcttcactagcaggtgctggacgtccctccaggttaactggctgtttgcttctagagccaaggcgatgatgcccgccaccatgggggcagagactgaggtcccagtgtggccatcggtacagcgctgacgcagatccgtggtgacgatttttcgctcataaaaggccccactgctgtaggtggtggccagggtggaggcacactcttccaggtaccagggcttgtagccattctcggtggcgctgctgacggagatggtgtagatgctgttggtgtagccatcgcacgagcagtagtccccctctctcccgccattcccagatgcccagacgaaaatggagcccaggccctgccggccctttttaatgccatactcgaaagcctgcttagccagtcggccgggcccgtccaccgtcttgccgtcgtcgtccggcccccagctggcactgtaaatgtcgatgtagttgggtctgatgcccagcgactttgcctcgaccacatctgtgacatcgccgtccagcatgcggatgcctcctattttggcattgtacgctatgcccacgatgcagtaggaattgtttgctgaagcagcaacttctcccgcacaacgagtgccgtgtttattttcattgctggcatcatatcgtggagatgggtcataatcattgccgttcacgtcgtagctggcgtaggaatcataatttggggccaggtcagggtgatttctctctatgccatcatcaaggatggtgaccaccacgttttttcctgtgtagcccctcttccacgctgcctggacattcatttccgaccggcagcgactgttcttgtcgccacaatgcaggtaccacatgttggaccaaatggggtcgttgaagtaaagggcctgcgggtcacttcgcacctgtctcttcacccttcgtttcacttcctgttgctggagccatttcacctgggggtccattctgaggaaggtgtgagggcctctgctactcaaggttgatcttttaaaggttttgctgtgataaaaatggtagtaatcttccaggtttccaatctggcccaagttgaggtagccgtgcgccgccgccacgcggtccgcctcggccgggccgcccagcacttgcaccgcccagtggttggtgtagacggggcgcggcgggggcgcggagcaggcggcagnnnnnnnnnnnnnnnnnnnncagcgccagggacgcggcgcgagcggccggaacccgggcccgccggcgccccccgcgccccccgcgccccccgcgcccgnnnnnnnnnnnnnnnnnnnnnnnnnccggggcggcggccggggcccgggcgcaggcggcgcgcgcggaggcatagcggcgacaggctcgcgcggcgcccgagctgcgagtgcgccggggggtggagtgccgccttttaaagccgctc

SEQ ID NO: 15 - DNA, 6321 bp, Homo sapiens
  misc_feature: Incyte ID No: 474310.13
  unsure 4385-4438, 4440, 4442, 4446, 4448, 4454, 4461: a, t, c, g, or other
acggtggtcgcacttggagggtctcgctgccagtggaaggagccaccgcccccgcccgaccatggccgaggagctggtcttagagaggtgtgatctggagctggagaccaatggccgagaccaccacacggccgacctgtgccgggagaagctggtggtgcgacggggccagcccttctggctgaccctgcactttgagggccgcaactacgaggccagtgtagacagtctcaccttcagtgtcgtgaccggcccagcccctagccaggaggccgggaccaaggcccgttttccactaagagatgctgtggaggagggtgactggacagccaccgtggtggaccagcaagactgcaccctctcgctgcagctcaccaccccggccaacgcccccatcggcctgtatcgcctcagcctggaggcctccactggctaccagggatccagctttgtgctgggccacttcattttgctcttcaacgcctggtgcccagcggatgctgtgtacctggactcggaagaggagcggcaggagtatgtcctcacccagcagggctttatctaccagggctcggccaagttcatcaagaacataccttggaattttgggcagtttgaagatgggatcctagacatctgcctgatccttctagatgtcaaccccaagttcctgaagaacgccggccgtgactgctcccgccgcagcagccccgtctacgtgggccgggtggtgagtggcatggtcaactgcaacgatgaccagggtgtgctgctgggacgctgggacaacaactacggggacggcgtcagccccatgtcctggatcggcagcgtggacatcctgcggcgctggaagaaccacggctgccagcgcgtcaagtatggccagtgctgggtcttcgccgccgtggcctgcacagtgctgaggtgcctgggcatccctacccgcgtcgtgaccaactacaactcggcccatgaccagaacagcaaccttctcatcgagtacttccgcaatgagtttggggagatccagggtgacaagagcgagatgatctggaacttccactgctgggtggagtcgtggatgaccaggccggacctgcagccggggtacgagggctggcaggccctggacccaacgccccaggagaagagcgaagggacgtactgctgtggcccagttccagttcgtgccatcaaggagggcgacctgagcaccaagtacgatgcgccctttgtctttgcggaggtcaatgccgacgtggtagactggatccagcaggacgatgggtctgtgcacaaatccatcaaccgttccctgatcgttgggctgaagatcagcactaagagcgtgggccgagacgagcgggaggatatcacccacacctacaaatacccagaggggtcctcagaggagagggaggccttcacaagggcgaaccacctgaacaaactggccgagaaggaggagacagggatggccatgcggatccgtgtgggccagagcatgaacatgggcagtgactttgacgtctttgcccacatcaccaacaacaccgctgaggagtacgtctgccgcctcctgctctgtgcccgcaccgtcagctacaatgggatcttggggcccgagtgtggcaccaagtacctgctcaacctcaacctggggcctttctctgagaagagcgttcctctttgcatcctctatgagaaataccgtgactgccttacggagtccaacctcatcaaggtgcgggccctcctcgtggagccagttatcaacagctacctgctggctgagagggacctctacctggagaatccagaaatcaagatccggatccttggggagcccaagcagaaacgcaagctggtggctgaggtgtccctgcagaacccgctccctgtggccctggaaggctgcaccttcactgtggagggggccggcctgactgaggagcagaagacggtggagatcccagaccccgtggaggcaggggaggaagttaaggtgagaatggacctgctgccgctccacatgggcctccacaagctggtggtgaacttcgagagcgacaagctgaaggctgtgaagggcttccggaatgtcatcattggccccgcctaagggacccctgctcccagcctgctgagagcccccaccttgatcccaatccttatcccaagctagtgagcaaaatatgccccttcttgggccccagaccccagggcagggtgggcagcctatgggggctctcggaaatggaatgtgcccctggcccatctcagcctcctgagcctgtgggtccccactcaccccctttgctgtgaggaatgctctgtgccagaaacagtgggagccctgaccttggctgactggggctggggtgagagaggaaagacctacattccctctcctgcccagatgccctttggaaagccattgaccacccaccatattgtttgatctacttcatagctccttggagcaggcaaaaaagggacagcatgccccttggctggatcagggaatccagctccctagactgcatcccgtacctcttcccatgactgcacccagctccaggggcccttgggacagccagagctgggtggggacagtgataggcccaaggtcccctccacatcccagcagcccaagcttaatagccctccccctcaacctcaccattgtgaagcacctactatgtgctgggtgcctcccacacttgctggggctcacggggcctccaacccatttaatcaccatgggaaactgttgtgggcgctgcttccaggataaggagactgaggcttagagagaggaggcagccccctccacaccagtggcctcgtggttattagcaaggctgggtaatgtgaaggcccaagagcagagtctgggcctctgactctgagtccactgctccatttataaccccagcctgacctgagactgtcggagaggctgtctggggcctttatcaaaaaaagactcagccaagacaaggaggtagagaggggactgggggactgggagtcagagccctggctgggttcaggtcccacgtctggccaggcactgccttctcctctctgggcctttgtttccttgttggtcagaggagtgattgaaccagctcatctccaaggatcctctccactccatgtttgcaatgcttttatatggcccagccttgtaaataaccacaaggtccactccctgctccacgaagccttaagccataggcccaggatatttctgagagtgaaaccatgactgtgaccaccttctgtccccagccctgtcctggttccttcctatgcccaggtaccacccttcagaccccagttctaggggagaagagccctggacacccctgctctacccatgagcctgcccgctgcaatgcctagacttcccaacagccttagctgccagtgctggtcactaaccaacaaggttggcaccccagctaccccttctttgcagggctaaggcccccaaacatagcccctgccccggaggaagcttggggaacccatgagttgtcagctttgactttatctcctgctctttctacatgactgggcctcccttgggctggaagaattggggattctctattggaggtgagatcacagcctccagggccccccaaatcccagggaaggacttggagagaatcatgctgttgcatttagaactttctgctttgcacaggaaagagtcacacaattaatcaacatgtatattttctctatacatagagctctatttctctacggttttataaaagccttgggttccaaccaggcagtagatgtgcttctgaaccgcaaggagcaaacactgaaataaaataaacttgtcctcgtcatattcatccacgtccaccttccggaagaggcctttgccgctggtcgggattgggatgtcgaagaacacagtgtcgtcggcccgcttccggaaggaaagacagccaccgacctcagaagcagcccctccttgcgctggaccagaaggataaggggagacctagccaccagtgggccagtgggggtgaggggcttctaggaaaaccggtgtctgggactctggcggttgatggtgtcatctgcgcgggatgctgggcctccacctcccaacctcctccgggacagtacaggtttgggggcaaggcctgagcagggcaggctggggagaccgctgtccctggggttttgtgggcaggggctgggtgcaggccggacagacagaaagcagtcccagctcaaggcagaaggccagagggtgtggagtgaaagggacaggcgaagccaggttcggagagatggagggaacaggccaccaagctcagaagcgagaaaggtctgaggaagcacannnnnnnnnnnnnnnnnnnnnnnnnnnnnnnnnnnnnnnnnnnnnnnnnnnnnnananagananagaganagagagnaaggacggggaaagagagaacagaagggaggactggtcgaagggccagtggagcaggggtcttggagggacaggccatgaacttgcaagggggctgaggggagccgcagagtcggggagggttgaaaggctggaaatgcatgaggaggaggaacagaacatgtgtgtctggacaggtgcggcagccctggcagagcccactgtccccattcttatggaccgcctcctggctgctgacccagggactgttctcctaggactggagccttggacacttgggtttgggagtgaacgagaaaaaagcttcatggggtgcctctgggtggctgtggtgggagagcaggggcagctctgaggccaagggaacatgtgatgggggccgggccttgcgcccacctgcacccttgggagccagggagaggcggtgatggggcatcgagctggggtcagggacctgaggtggggggctgggttggacgcagctgggccctggcttagcttcctggctctgcctccccatcaggatgtctggctgtgttccccagagacccccactgaggccccgcggtggctgcagctgcctctactttttgtagttgccaaactggatggccaggcggtcagtgacgcagcggaaagtggccggctgcacctcccagtagggcacggggttgttgaagaggctgatgccgttgtagtaggcccgcttcaccccgaagcccatgggacagaagtcgttgacacccactttggtgatgttgttggagtgcagatagaccacctggaggagcttgaggtctgggagccctgagggcaccctggccaacttgttgttgtccaagtggagctcccggagggtgggcaggaagctcaggctcccgttctcgatcatcctgatctggttgtggcctaggcccagcctgtacagcttggagtagcgaagcaggtcctccagttcgatggcctggattttgttgtggtctaggtggagttcattcagggtctcagggaggtctttggggatgccagtcagcttggcctctgagatgcgcaggtagttgagcttcaggccatcgaaggctccaggttcaaagccactgttctccagtgggttcccgcccatctcgatgcagttcatgttccggagcccgctgaacactcccttgggcaccttgcggatgcggttgtcgtggatgcggagctccaccagggagctgggtaggttgggcgggatctccaccaggtggttcttggagatgtagagcttctgcagcttccgcagtgggctgaaggccttctcatggatcttggagatcttgttgttcaccaggacgagggcgtagaggtgctggagacccttgaagtcatccttgcggagctcggagatgtcgttgttctgcaggtccagcagcgtggtgtcaggggagatctctttgggcacagacttcagacccaggtcggagcactgaaccacccgcaggtggcagtggcagccgaaaggacacatggcgctgtaggtgggtgtgacagagtccgggtccaggacgcctgaggtgtcagcgcccgaagcttcctcatcgttcatcatgaatggcccatcgtccagggtgaagtcccagaagcctctctgctcaaagggcagggcctggctcagggccagcagagacacgaggcgccacaggggccacatggcggatggacctggagaggggaggcgccaggcgcaggctgactagttggcgggctggggtggtgggccgtccgcacgtctatctgtccggtgtgtccggcggaccgaaagcagctactcactcctgggcagtttgtggagagagggagacagaggcggcgggcgggaggc

SEQ ID NO: 16 - DNA, 3413 bp, Homo sapiens
  misc_feature: Incyte ID No: 413006.13
caactgtcaaaatgtttacgcacctgggtgagatttctgcaaaatgagaaatagaccttctactttaatgtaattactgaaataatagcaccttattcagtgtggtgcttaccaatttattatgtacgttaacacgatggatctcaaactcttagctgtcaaacactgatggatgtaactgagaaaatgttatttctgtatatttaggtatcctgaactcatttgcattggtttacattctaacacatttacttttgtgagagagacaagacaggtattcccgttaatgctcacagtatgcgtcgtacctgaaaatgtcatatgtcatgcatattgcggtggcaaaaatgttgagaaagactgaggaaaccgcagacagaccgcgcagggagcacacaccgccagtctgtgcgctgagtcggagccagaggccgcggggacaccgggccatgcacgcccccaactgaagctgcatctcaaagccgaagattccagcagcccaggggatttcaaagagctcagactcagaggaacatctgcggagagacccccgaagccctctccagggcagtcctcatccagacgctccgctagtgcagacaggagcgcgcagtggccccggctcgccgcgccatggagcggatccccagcgcgcaaccaccccccgcctgcctgcccaaagcaccgggactggagcacggagacctaccagggatgtaccctgcccacatgtaccaagtgtacaagtcaagacggggaataaagcggagcgaggacagcaaggagacctacaaattgccgcaccggctcatcgagaaaaagagacgtgaccggattaacgagtgcatcgcccagctgaaggatctcctacccgaacatctcaaacttacaactttgggtcacttggaaaaagcagtggttcttgaacttaccttgaagcatgtgaaagcactaacaaacctaattgatcagcagcagcagaaaatcattgccctgcagagtggtttacaagctggtgagctgtcagggagaaatgtcgaaacaggtcaagagatgttctgctcaggtttccagacatgtgcccgggaggtgcttcagtatctggccaagcacgagaacactcgggacctgaagtcttcgcagcttgtcacccacctccaccgggtggtctcggagctgctgcagggtggtacctccaggaagccatcagacccagctcccaaagtgatggacttcaaggaaaaacccagctctccggccaaaggttcggaaggtcctgggaaaaactgcgtgccagtcatccagcggactttcgctcactcgagtggggagcagagcggcagcgacacggacacagacagtggctatggaggagaatcggagaagggcgacttgcgcagtgagcagccgtgcttcaaaagtgaccacggacgcaggttcacgatgggagaaaggatcggcgcaattaagcaagagtccgaagaaccccccacaaaaaagaaccggatgcagctttcggatgatgaaggccatttcactagcagtgacctgatcagctccccgttcctgggcccacacccacaccagcctcctttctgcctgcccttctacctgatcccaccttcagcgactgcctacctgcccatgctggagaagtgctggtatcccacctcagtgccagtgctatacccaggcctcaacgcctctgccgcagccctctctagcttcatgaacccagacaagatctcggctcccttgctcatgccccagagactcccttctcccttgccagctcatccgtccgtcgactcttctgtcttgctccaagctctgaagccaatcccccctttaaacttagaaaccaaagactaaactctctaggggatcctgctgctttgctttccttcctcgctacttcctaaaaagcaacaaaaaagtttttgtgaatgctgcaagattgttgcattgtgtatactgagataatctgaggcatggagagcagattcagggtgtgtgtgtgtgtgtgtgtgtgtgtgtgtgtgtgtatgtgcgtgtgcgtgcacatgtgtgcctgcgtgttggtataggactttaaagctccttttggcatagggaagtcacgaaggattgcttgacatcaggagacttgggggggattgtagcagacgtctgggcttttccccacccagagaatagcccccttcgatacacatcagctggattttcaaaagcttcaaagtcttggtctgtgagtcactcttcagtttgggagctgggtctgtggctttgatcagaaggtactttcaaaagagggctttccaggggctcagctcccaaccagctgttaggaccccacccttttgcctttattgtcgacgtgactcaccagacgtcggggagagagagcagtcagaccgagctttctgctaacatggggaggtagcaggcactggcatagcacggtagtggtttggggaggtttccgcaggtctgctccccacccctgcctcggaggaataaagagaatgtagttccctactcaggctttcgtagtgattagcttactaaggaactgaaaatgggccccttgtacaagctgagctgccccggagggagggaggagttccctgggcttctggcacctgtttctaggcctaaccattagtacttactgtgcagggaaccaaaccaaggtctgagaaatgcggacaccccgagcgagcaccccaaagtgcacaaagctgagtaaaaagctgcccccttcaaacagaactagactcagttttcaattccatcctaaaactccttttaaccaagcttagcttctcaaaggcctaaccaagccttggcaccgccagatcctttctgtaggctaattcctcttgcccaacggcatatggagtgtccttattgctaaaaaggattccgtctccttcaaagaagttttatttttggtccagagtacttgttttcccgatgtgtccagccagctccgcagcagcttttcaaaatgcactatgcctgattgctgatcgtgttttaactttttcttttcctgtttttattttggtattaagtcgttgcctttatttgtaaagctgttataaatatatattatataatatatatttgtaaagctgttataaatatatattatataaatatattaaaaaggaaaatgtttcagatgtttatttgtataattacttgattcacacagtgagaaaaaatgaatgtattcctgtttttgaagagaagaataattttttttttctctagggagaggtacagtgtttatattttggagccttcctgaaggtgtaaaattgtaaatatttttatctatgagtaaatgttaagtagttgttttaaaatacttaataaaataattcttttcctgtggaagagaaaaa

SEQ ID NO: 17 - DNA, 2169 bp, Homo sapiens
  misc_feature: Incyte ID No: 076460.2
ggaggcgtctgcgctgatcgggtccgccgcgcgccagagccagagtcgcagccgaggggagccggggccggagcccgagcccgagccgagccggagcccgagcgagcggcggagaccgtgcccccgcctcggccccgcgccgccgcggccaggcccggcatggaggaggagtgccgggtgctctccatacagagccacgtcatccgcggctacgtgggcaaccgggcggccaccgttcccgctgcaggttttgggatttgagattgacgcggtgaactctgtccagttttcaaaccacacaggctatgcccactggaagggccaagtgctgaattcagatgagctccaggagttgtacgaaggcctgaggctgaacaacatgaataaatatgactacgtgctcacaggttatacgagggacaagtcgttcctggccatggtggtggacattgtgcaggagctgaagcagcagaaccccaggctggtgtacgtgtgtgatccagtcttgggtgacaagtgggacggcgaaggctcgatgtacgtcccggaggacctccttcccgtctacaaagaaaaagtggtgccgcttgcagacattatcacgcccaaccagtttgaggccgagttactgagtggccggaagatccacagccaggaggaagccttgcgggtgatggacatgctgcactctatgggccccgacaccgtggtcatcaccagctccgacctgccctccccgcagggcagcaactacctgattgtgctggggagtcagaggaggaggaatcccgctggctccgtggtgatggaacgcatccggatggacattcgcaaagtggacgccgtctttgtgggcactggggacctgtttgctgccatgctcctggcgtggacacacaagcaccccaataacctcaaggtggcctgtgagaagaccgtgtctaccttgcaccacgttctgcagaggaccatccagtgtgcaaaagcccaggccggggaaggagtgaggcccagccccatgcagctggagctgcggatggtgcagagcaaaagggacatcgaggacccagagatcgtcgtccaggccacggtgctgtgagggccccgccgcttgcccgtgacacgcagcgcgttggtgtctccgtgtttgtccctgtgaaaacatgtaacgtctgccttagagccatgaccgaaacttgatatttttttctttcatgagtgtccggcatctgctggtcttcattgtgaaacgtgccagtcgtgctttgtgaaaaataacaaagtggtcacagaaatttgtgatctgaaaacccggctcccttccccacaaggctcctgggcctccgggaagacgggcccctgtttgccatctcgggggtgttccctgtgggagggtgagtgggtgaggccgagcctgctgcgtgtggagcctcgagtgggccctggctgccactaccgtacagaggccgtgtcgcgctgggctgggcctgggtggcctctgtctttgcatctctgagaaggagtcgggtggtaacggttggggtcaggaagaattctgccaagtatctttactgtcattctgaccatagcctctttgttcccgcattcgaacttttggttcttactttgctgctcgtttagtccctggggatttcagatcttaggctgttgtttcaccgtatgggagggttgatgtgagcttgcttggagacacacggtgcagcatcagggaccttcccaggccccagcaaattcaagtcggtctgcagacctctcagctacccgcgggacctcttgtaacccatcggcatcttccaggaatccgccgagtgacttgaggaagatgctaacgcagtaaggtctgtgctgggccaagagcagctttgaagctccagagaaccaccccgtcaggttccttgtggaagctcccctcatccgtggtgcagcaggctgagcactgcgcgtttgccacgtgctgcccgtgacagcacattgagccacagcatttgtagacaggacagaggggtgcctgccccctgcccctgctggcacatttaacccttgtcccctgacctcagttctgtgccccaccaaatgcccaggggcaagaggccaccctggaagctgccaatcttccaaggtgggtgtggggcacggtgggggcgggca

SEQ ID NO: 18 - DNA, 2578 bp, Homo sapiens
  misc_feature: Incyte ID No: 474374.4
  unsure 2154: a, t, c, g, or other
cactagcctcctgccccgcggcgctgccgcacgagccccacgagccgctcaccccgccgttctcagcgctgcccgaccccgctggcgcgccctcccgccgccagtcccggcagcgccctcagttgtcctccgactcgccctcggccttccgcgccagccgcagccacagccgcaacgccacccgcagccacagccacagccacagccccaggcatagccttcggcacagccccgggctccggctcctgcggcagctcctctgggcaccgtccctgcgccgacatcctggaggttgggatgctcttgtccaaaatcaactcgcttgcccacctgcgcgccgcgccctgcaacgacctgcacgccaccaagctggcgcccggcaaggagaaggagcccctggagtcgcagtaccaggtgggcccgctactgggcagcggcggcttcggctcggtctactcaggcatccgcgtctccgacaacttgccggtggccatcaaacacgtggagaaggaccggatttccgactggggagagctgcctaatggcactcgagtgcccatggaagtggtcctgctgaagaaggtgagctcgggtttctccggcgtcattaggctcctggactggttcgagaggcccgacagtttcgtcctgatcctggagaggcccgagccggtgcaagatctcttcgacttcatcacggaaaggggagccctgcaagaggagctggcccgcagcttcttctggcaggtgctggaggccgtgcggcactgccacaactgcggggtgctccaccgcgacatcaaggacgaaaacatccttatcgacctcaatcgcggcgagctcaagctcatcgacttcgggtcgggggcgctgctcaaggacaccgtctacacggacttcgatgggacccgagtgtatagccctccagagtggatccgctaccatcgctaccatggcaggtcggcggcagtctggtccctggggatcctgctgtatgatatggtgtgtggagatattcctttcgagcatgacgaagagatcatcaggggccaggttttcttcaggcagagggtctcttcagaatgtcagcatctcattagatggtgcttggccctgagaccatcagataggccaaccttcgaagaaatccagaaccatccatggatgcaagatgttctcctgccccaggaaactgctgagatccacctccacagcctgtcgccggggcccagcaaatagcagcctttctggcaggtcctcccctctcttgtcagatgcccgagggaggggaagcttctgtctccagcttcccgagtaccagtgacacgtctcgccaagcaggacagtgcttgatacaggaacaacatttacaactcattccagatcccaggcccctggaggctgcctcccaacagtggggaagagtgactctccaggggtcctaggcctcaactcctcccatagatactctcttcttctcataggtgtccagcattgctggactctgaaatatcccgggggtggggggtgggggtgggtcagaaccctgccatggaactgtttccttcatcatgagttctgctgaatgccgcgatgggtcaggtaggggggaaacaggttgggatgggataggactagcaccattttaagtccctgtcacctcttccgactctttctgagtgccttctgtggggactccggctgtgctgggagaaatacttgaacttgcctcttttacctgctgcttctccaaaaatctgcctgggttttgttccctatttttctctcctgtcctccctcaccccctccttcatatgaaaggtgccatggaagaggctacagggccaaacgctgagccacctgcccttttttctgcctcctttagtaaaactccgagtgaactggtcttcctttttggtttttacttaactgtttcaaagccaagacctcacacacacaaaaaatgcacaaacaatgcaatcaacagaaaagctgtaaatgtgtgtacagttggcatggtagtatacaaaaagattgtagtggatctaatttttaagaaattttgcctttaagttattttacctgtttttgtttcttgttttgaaagatgcgcattctaacctggaggtcaatgttatgtatttatttaattanttatttggttcccttcctattccaagcttccatagctgctgccctagttttctttcctcctttcctcctctgacttggggaccttttgggggagggctgcgacgcttgctctgtttgtggggtgacgggactcaggcgggacagtgctgcagctccctggcttctgtggggcccctcacctacttacccaggtgggtcccggctctgtgggtgatggggaggggcattgctgactgtgtatataggataattatgaaaagcagttctggatggtgtgccttccagatcctctctggggctgtgttttgagcagcaggtagcctgctggttttatctgagtgaaatactgtacaggggaataaaagagatcttatttttttttttatacttggcgttttttgaataaaaaccttttgtcttaaaa

SEQ ID NO: 19 - DNA, 2618 bp, Homo sapiens
  misc_feature: Incyte ID No: 427792.8
gcccaggctacggcggctgcagggctccggcaaccgctccggcaacgccaaccgctccgctgcgcgcaggctgggctgcaggctctcggctgcagcgctgggtgtcttcaggcctatggagagcagcttgcgtgggctgggcctgcagtacctggtttgcatagatgattggcaggtggatctaggatccggcttccaacatgtggcagctctgggcctccctctgctgcctgctggtgttggccaatgcccggagcaggccctctttccatcccctgtcggatgagctggtcaactatgtcaacaaacggaataccacgtggcaggccgggcacaacttctacaacgtggacatgagctacttgaagaggctatgtggtaccttcctgggtgggcccaagccaccccagagagttatgtttaccgaggacctgaagctgcctgcaagcttcgatgcacgggaacaatggccacagtgtcccaccatcaaagagatcagagaccagggctcctgtggctcctgctgggccttcggggctgtggaagccatctctgaccggatctgcatccacaccaatgcgcacgtcagcgtggaggtgtcggcggaggacctgctcacatgctgtggcagcatgtgtggggacggctgtaatggtggctatcctgctgaagcttggaacttctggacaagaaaaggcctggtttctggtggcctctatgaatcccatgtagggtgcagaccgtactccatccctccctgtgagcaccacgtcaacggctcccggcccccatgcacgggggagggagatacccccaagtgtagcaagatctgtgagcctggctacagcccgacctacaaacaggacaagcactacggatacaattcctacagcgtctccaatagcgagaaggacatcatggccgagatctacaaaaacggccccgtggagggagctttctctgtgtattcggacttcctgctctacaagtcaggagtgtaccaacacgtcaccggagagatgatgggtggccatgccatccgcatcctgggctggggagtggagaatggcacaccctactggctggttgccaactcctggaacactgactggggtgacaatggcttctttaaaatactcagaggacaggatcactgtggaatcgaatcagaagtggtggctggaattccacgcaccgatcagtactgggaaaagatctaatctgccgtgggcctgtcgtgccagtcctgggggcgagatcggggtagaaatgcattttattctttaagttcacgtaagatacaagtttcaggcagggtctgaaggactggattggccaaacatcagacctgtcttccaaggagaccaagtcctggctacatcccagcctgtggttacagtgcagacaggccatgtgagccaccgctgccagcacagagcgtccttccccctgtagactagtgccgtagggagtacctgctgccccagctgactgtggccccctccgtgatccatccatctccagggagcaagacagagacgcaggaatggaaagcggagttcctaacaggatgaaagttcccccatcagttcccccagtacctccaagcaagtagctttccacatttgtcacagaaatcagaggagagatggtgttgggagccctttggagaacgccagtctcccaggccccctgcatctatcgagtttgcaatgtcacaacctctctgatcttgtgctcagcatgattctttaatagaagttttattttttcgtgcactctgctaatcatgtgggtgagccagtggaacagcgggagacctgtgctagttttacagattgcctcctaatgacgcggctcaaaaggaaaccaagtggtcaggagttgtttctgacccactgatctctactaccacaaggaaaatagtttaggagaaaccagcttttactgtttttgaaaaattacagcttcaccctgtcaagttaacaaggaatgcctgtgccaataaaaggtttctccaacttgaagtctactctgatgggatctcagatcctttgtcactgcctatagacttgtagctgctgtctctctttgtccctgcagagaatcacgtcctggaactgcatgttcttgcgactcttgggacttcatcttaacttctcgctgccccagccatgttttcaaccatggcatccctcccccaattagaaccctgtcaacctcgtcaaacatctctgtaagtgcctggtaagcttgcccttgcttaagaactcaaaacatagctgtgctctatttttttgttgttgttgtgactgacggagtgagattccgtctcccaggctggagtgcagtggcgccttctcagctcactgcaacctcacgcctgatactgtatcaggcgtgaagttgcagtgagccacggacaagtgccagtggcacttccaggctcgcgtgtacagcggcaaggagtccggtctccaataaattaaagagagacaaaaaaaaaaaagggggcgggcccggctcttagaagggatatccaagggctttaacgaaacggcggtgacaatgcggaccgtgcataaggctccttttcagacaacaccaaagaaaaaaag

SEQ ID NO: 20 - DNA, 3975 bp, Homo sapiens
  misc_feature: Incyte ID No: 364482.3
ccggcgtcgggtgcgctcggcctcgcccgcggccctccttccccggctcccgctcgccgctcgttcactccaccgccgccgccgccgccgccgctgccgctgccgctgccgcacctccgtagctgactcggtactctctgaagatggcagaagctcaccaagctgtggcctttcagttcacggtcactccggacgggattgacctgcggctgagccatgaagctcttagacaaatctatctctctggacttcattcctggaaaaagaagttcatcagattcaagaacggcatcatcactggcgtgtacccggcaagcccctccagttggcttatcgtggtggtgggcgtgatgacaacgatgtacgccaagatcgacccctcgttaggaataattgcaaaaatcaatcggactctggaaacggccaactgcatgtccagccagacgaagaacgtggtcagcggcgtgctgtttggcaccggcctgtgggtggccctcatcgtcaccatgcgctactccctgaaagtgctgctctcctaccacgggtggatgttcactgagcacggcaagatgagtcgtgccaccaagatctggatgggtatggtcaagatcttttcaggccgaaaacccatgttgtacagcttccagacatcgctgcctcgcctgccggtcccggctgtcaaagacactgtgaacaggtatctacagtcggtgaggcctcttatgaaggaagaagacttcaaacggatgacagcacttgctcaagattttgctgtcggtcttggaccaagattacagtggtatttgaagttaaaatcctggtgggctacaaattacgtgagcgactggtgggaggagtacatctacctccgaggacgagggccgctcatggtgaacagcaactattatgccatggatctgctgtatatccttccaactcacattcaggcagcaagagccggcaacgccatccatgccatcctgctttacaggcgcaaactggaccgggaggaaatcaaaccaattcgtcttttgggatccacgattccactctgctccgctcagtgggagcggatgtttaatacttcccggatcccaggagaggagacagacaccatccagcacatgagagacagcaagcacatcgtcgtgtaccatcgaggacgctacttcaaggtctggctctaccatgatgggcggctgctgaagccccgggagatggagcagcagatgcagaggatcctggacaatacctcggagcctcagcccggggaggccaggctggcagccctcaccgcaggagacagagttccctgggccaggtgtcgtcaggcctattttggacgtgggaaaaataagcagtctcttgatgctgtggagaaagcagcgttcttcgtgacgttagatgaaactgaagaaggatacagaagtgaagacccggatacgtcaatggacagctacgccaaatctctactacacggccgatgttacgacaggtggtttgacaagtcgttcacgtttgttgtcttcaaaaacgggaagatgggcctcaacgctgaacactcctgggcagatgcgccgatcgtggcccacctttgggagtacgtcatgtccattgacagcctccagctgggctatgcggaggatgggcactgcaaaggcgacatcaatccgaacattccgtaccccaccaggctgcagtgggacatcccgggggaatgtcaagaggttatagagacctccctgaacaccgcaaatcttctggcaaacgacgtggatttccattccttcccattcgtagcctttggtaaaggaatcatcaagaaatgtcgcacgagcccagacgcctttgtgcagctggccctccagctggcgcactacaaggacatgggcaagttttgcctcacatacgaggcctccatgacccggctcttccgagaggggaggacggagaccgtgcgctcctgcaccactgagtcatgcgacttcgtgcgggccatggtggacccggcccagacggtggaacagaggctgaagttgttcaagttggcgtctgagaagcatcagcatatgtatcgcctcgccatgaccggctctgggatcgatcgtcacctcttctgcctttacgtggtgtctaaatatctcgctgtggagtcccctttccttaaggaagttttatctgagccttggagattatcaacaagccagacccctcagcagcaagtggagctgtttgacttggagaataacccagagtacgtgtccagcggagggggctttggaccggttgctgatgacggctatggtgtgtcgtacatccttgtgggagagaacctcatcaatttccacatttcttccaagttctcttgccctgagacggattctcatcgctttggaaggcacctgaaagaagcaatgactgacatcatcactttgtttggtctcagttctaattccaaaaagtaattccactggagctgctgggaaggaaaacgagctcttctgatgcaaaccaaatgaaaaataggcattaatcctgaccttagctcgggatgaaacactgctcttaaaaaaactcagttttccttccagaaaatgtgggtgtttttttttcctagaacagtatctctcccctgtgaagcataaccccactacttccagacttgccctcccttgggggacatctgataaagtctcccctgatgtctccgcatcggcttggatttattaagggatgcaaatcttgttgagttaatgaaggaattagtagggttgtggcttcacacacagtggaatggaaatggtgtgctttctcagtggcaaccgaaggcctagtgcttaagggcatttagcatcatccaagcagggtaaacttttgttttgttaaaagaaaaatgtgttattcaagttggtgtccccagttgtagctaacacatctggaatgcactaaccaaaatgctgtgctttggagacctgcttttgtcaccgtgggtaaccgttcccgtctggtccagtagcctgtgtttgcctctccacatttgaagcaagcaggatgcaaggtcttcagttttactgaccttgtatgtcttcaagtcttcacaacccagtgccttaaaaatgaaaggccctaaatgtaagggagatggagagaaagatttattttgtagagtctttgggtggaattgtgggtatactgttcccttcacaattgactgagtatggataaccgtacataagcatttgctacaccccaccagccccctccccctcagaaacaccagttccttcccaagggcagctgtgccagactcccctcccgggactgccttcttgtcatcataagcaacaaaagaaataacaggcacatgtcataaaaggggagcaagggccgtgatggtcagataattcactcaagaataaaacatgacacgtgcctcaggaggatctctttcccaaagtgacagcaaggagggcagggcatcggccaccaagcggggactagcaagtgaggaaggggagggcagtccaccgtggtgaggagagagtggctccacgaccccaagggatggccttctcctcccacccggtgaggggaaagactcaccagagggtgatggagacagtatgccggctcaccttggtgaccagccaagatgtctcaagtgacggtgctgggtgttcacccagcctgtccttcagataggagtgccttcacgaaagcgtctcatggaccacaaagcaattatgcactgagtcatcttcagtatttaatgcaaaaatgaagcatcatggaatgaaattcccactgtctgtcatgacaagcttagctgtccattgttttaaattgtgtatttatttttttgaccacttggttctagttgggcctgactccttcagagtgctgcaccccgatagtacaacagcgatggctgaactgttggagtcgatggaaggtgcttgccggagaacacgtgcc

SEQ ID NO: 21 - DNA, 584 bp, Homo sapiens
  misc_feature: Incyte ID No: 978487.1
  unsure 575: a, t, c, g, or other
gcgacagagcgagactccgtctaaaaaaaaaagcaaaaacaaaccaacaacaaaagcccctgactgtccgtcaagcaggcagcggggatgtagctctctctgccctgggcaagaatagcacttcccgttaaaagccagcagccggcgtcagtccctatcagagccagctagatcatgcactgttgaccactgagcaatctgtgttacactagagttcacagggcattttgagtgtagacgtgagtgcttaaacatatttgggtttctctctcaggttttaaatgtttcaaatgtaattgttgctcatcagtgcagttatcaatgcaattttatattccttgaggggagaaagaggggtcttattgtacatgtccaaggggggtgataagagtattatctgtttaatttaattggaacaaaccattgtcttaacgcagccatggtttgaatttgttatcttgggctgaccggtgcatgtaaatacagtatgctctttggatgtaaatcttagaaatgcagtgtgaatgtaggttatcattaataaaacattaaccccagtctactacaaaaaaaanacaaccaac

SEQ ID NO: 22 - DNA, 1841 bp, Homo sapiens
  misc_feature: Incyte ID No: 410626.2
tcgcgaccacgcgcccggcacaacaccacggggacattatgcgtgattactgacaggcaccagctgctgccgccacagccgtctcaaacgcactatgtggactctccgatctagaggcagattcctgactaatcccagagggctggcccagcctgtgctccccgggctgctaggaagcgatgaccactcttgttagcccaagttgaagaaagccgggctgtgcctgggagccgagagaggcggtaatatttagaagctgcacaggagaggaacatgaactgacgagtaaacatgtatggaaattattctcacttcatgaagtttcccgcaggctatggaggctcccctggccacactggctctacatccatgagcccatcagcagccttgtccacagggaagccaatggacagccaccccagctacacagataccccagtgagtgccccacggactctgagtgcagtggggacccccctcaatgccctgggctctccatatcgagtcatcacctctgccatgggcccaccctcaggagcacttgcagcgcctccaggaatcaacttggttgccccacccagctctcagctaaatgtggtcaacagtgtcagcagttcagaggacatcaagcccttaccagggcttcccgggattggaaacatgaactacccatccaccagccccggatctctggttaaacacatctgtgccatctgtggagacagatcctcaggaaagcactacggggtatacagttgtgaaggctgcaaagggttcttcaagaggacgataaggaaggacctcatctacacgtgtcgggataataaagactgcctcattgacaagcgtcagcgcaaccgctgccagtactgtcgctatcagaagtgccttgtcatgggcatgaagagggaagctgtgcaagaagaaagacagaggagccgagagcgagctgagagtgaggcagaatgtgctaccagtggtcatgaagacatgcctgtggagaggattctagaagctgaacttgctgttgaaccaaagacagaatcctatggtgacatgaatatggagaactcgacaaatgaccctgttaccaacatatgtcatgctgctgacaagcagcttttcaccctcgttgaatgggccaagcgtattccccacttctctgacctcaccttggaggaccaggtcattttgcttcgggcagggtggaatgaattgctgattgcctctttctcccaccgctcagtttccgtgcaggatggcatccttctggccacgggtttacatgtccaccggagcagtgcccacagtgctggggtcggctccatctttgacagagttctaactgagctggtttccaaaatgaaagacatgcagatggacaagtcggaactgggatgcctgcgagccattgtactctttaacccagatgccaagggcctgtccaacccctctgaggtggagactctgcgagagaaggtttatgccacccttgaggcctacaccaagcagaagtatccggaacagccaggcaggtttgccaagctgctgctgcgcctcccagctctgcgttccattggcttgaaatgcctggagcacctcttcttcttcaagctcatcggggacacccccattgacaccttcctcatggagatgttggagaccccgctgcagatcacctgagccccaccagccacagcctccccagccaggatgacccctgggcaggtgtgtgtggacccccaccctgcactttcctccacctcccaccctgacccccttgctgtccccaaaatgtgatgcttataataaagaaaacctttctacaaaaaaaaaaaaaa

SEQ ID NO: 23 - DNA, 1260 bp, Homo sapiens
  misc_feature: Incyte ID No: 234480.6
gcactttatgcttccccagaggtgactaaactctgatcattgccaatgggcaggcactccccaaatgtccaaggacaacaaagatacccagagtgtctttcatagctaccaatgattaaatagcaagtattgcattcctgggcattgctaactagtgaagtataccagatggaaatgtcttcgaagctgtccctttaaaactcgagcaagctaccaggcaaactccgcctccagggaggttccttattaaataggagccaactggctgggtcggggctcaataccccaagcaatacctgcaactgaggattcttcccggggagaccgcagcccatcggcatgggctcaagagtttgtgaactgcaaaatccagcctgggaaggtggttgtgttcatcaagcccacctgccccgtactgcaggagggcccaagagatcctcagtcaattgcccatcaaacaagggcttctggaatttgtcgatatcacagccaccaaccacactaacgagattcaagattatttgcaacagctcacgggagcaagaacggtgcctcgagtctttatcggtaaagattgtataggcggatgcagtgatctagtctctttgcaacagagtggggaactgctgacgcggctaaagcagattggagctctgcagtaaccacagatctcataggaaatgttcaacaattctgtgaaaggtcacaggacccaattggagaaatcatatgaaaagcatagttggtcttggtgtcatatggatcagaggcacaagtgcagaggctgtggtcatgcggaacactctgttatttaagatggctatccagataatcctgaacactgtgtatttattttatttagactaccagcaaagattaaagcatgaaatgtaaaacatctgataaaacttacagccccctacaccaagagtgtatctgtgaaagagctcctacactttgaaaacttaagaatcccttatcatgaagtttgcctgttctagaattgtaagattgttaatttccttcaatctctagtgacaacacttaatttcttttctaataaaaaaaacctatagatgattcagtgatttttgtccaattcatttgcatgttctcaagacattaaggaatgttatgcgaaatacactaacttaaaactgtgtttatatttggccctgccattataaataaagacacgtgctgctgtcactcactgagtacaaatggctgatataattttgaagtttcatataaacatga

SEQ ID NO: 24 - DNA, 2400 bp, Homo sapiens
  misc_feature: Incyte ID No: 253542.2
  unsure 2350, 2357: a, t, c, g, or other
tccgtcgcggccgcagccccgcgggtcgccctcccgtgcctcgcccgcggacaccctggccgtggacaccctggccgtgggcacccgcggggcgcggcgcgggcgctgcgcggcggcggcggcggcatgaaggtcacgtcgctcgacggcggccacgtgcgcaagatgctccgcaaggaggcggcggcgcgctgcgtggtgctcgactgccggccctatctggccttcgctgcctcgaacgtgcgcggctcgctcaacgtcaacctcaactcggtggtgctgcggcgggcccggggcggcgcggtgtcggcgcgctacgtgctgcccgacgaggcgcggcgcgcgcggctcctgcaggagggcggcggcggcgtcgcggccgtggtggtgctggaccagggcagccgccactggcagaagctgcgagaggagagcgcgtttgtcgtcctcacctcgctactcgcttgcctacccgccggcccgcgggtctacttcctcaaagggggatatgagactttctactcggaatatcctgagtgttgcgtggatgtaaaacccatttcacaagagaagattgagagtgagagagccctcatcagccagtgtggaaaaccagtggtaaatgtcagctacaggccagcttatgaccagggtggcccagttgaaatccttcccttcctctaccttggaagtgcctaccatgcatccaagtgcgagttcctcgccaacttgcacatcacagccctgctgaatgtctcccgacggacctccgaggcctgcatgacccacctacactacaaatggatccctgtggaagacagccacacggctgacattagctcccactttcaagaagcaatagacttcattgactgtgtcagggaaaagggaggcaaggtcctggtccactgtgaggctgggatctcccgttcacccaccatctgcatggcttaccttatgaagaccaagcagttccgcctgaaggaggccttcgattacatcaagcagaggaggagcatggtctcgcccaactttggcttcatgggccagctcctgcagtacgaatctgagatcctgccctccacgcccaacccccagcctccctcctgccaaggggaggcagcaggctcttcactgataggccatttgcagacactgagccctgacatgcagggtgcctactgcacattccctgcctcggtgctggcaccggtgcctacccactcaacagtctcagagctcagcagaagccctgtggcaacggccacatcctgctaaaactgggatggaggaatcggcccagccccaagagcaactgtgatttttgtttttaagactcatggacatttcatacctgtgcaatactgaagacctcattctgtcatgctgccccagtgagatagtgagtggtcaccaggcttgcaaatgaacttcagacggacctcagggtaggttctcgggactgaaggaaggccaagccattacgggagcacagcatgtgctgactactgtacttccagacccctgccctcttgggactgcccagtccttgcacctcagagttcgccttttcatttcaagcataaggcaataaatacctgcagcaacgtgggagaaagaagttgctggaccaggagaaaaggcagttatgaagccaattgcattttgaaggaagcacaatttccaccttattttttgaactttggcagtttcaatgtctgtctctgttgcttcggggcataagctgatcaccgtctagttgggaaagtcaccctacagggtttgtagggacatgatcagcatcctgatttgaaccctgaaatgttgtgtagacaccctcttgggtccaatgaggtagttggttgaagtagcaagatgttggcttttctggattttttttgccatgggttcttcactgaccttggactttggcatgattcttagtcatacttgaacttgtctcattccacctcttctcagagcaactcttcctttgggaaaagagttcttcagatcatagaccaaaaaagtcataccttcgaggtggtagcagtagattccaggaggagaagggtacttgctaggtatcctgggtcagtggcggtgcaaactggtttcctcagctgcctgtccttctgtgtgcttatgtctcttgtgacaattgttttcctccctgcccctggaggttgtcttcaagctgtggacttctgggatttgcagattttgcaacgtggtactactttttttttctttttgtctgttagttatttctccaggggaaaaggcaataattttctaagacccgtgtgaatgtgaagaaaagcagtatgttactggttgttgttgttgntcttgtnctttatagtgtaaaataaaaatagtgaaaggagaaaagcaaaa

SEQ ID NO: 25 - DNA, 872 bp, Homo sapiens
  misc_feature: Incyte ID No: 234202.24
  unsure 732, 745, 758, 800, 821, 826, 830, 850-851, 854-855: a, t, c, g, or other
cgcggccacagtccctgcattgcgcgcgacccggcggcgggacaggcttgctgcttcctcctcctcggcctcaccattccagaccaaaattgaaaaaatggttgacctcacccaggtaatgggatgatgaagtattcatggcttttgcatcctatgcaacaattattctttcaaaaatgatgcttatgagtactgcaactgcattctatagattgacaagaaaggttttgccaatccagaagactgtgtagcatttggcaaaggagaaaatgccaagaagtatcttcgaacagatgacagagtagaacgtgtacgcagagcccacctgaatgaccttgaaaatattattccatttcttggaattggcctcctgtattccttgagtggtcccgacccctctacagccatcctgcacttcagactatttgtcggagcacggatctaccacaccattgcatatttgacaccccttccccagccaaatagagctttgagtttttttgttggatatggagttactctttccatggcttacaggttgctgaaaagtaaattgtacctgtaaagaaaatcatacaactcagcatccagttggctttttaagaattctgtacttccaatttataatgaatactttcttagattttaggtaggaggggagcagaggaattatgaactggggtaaacccatttgaatattagcatgccaatatcctgtattcttgttttacntttggattagaantttaacatagtanttcttaagtctttgtctgatttttaaagtactttcttataanttggatcagttatgattgtancatcncacnacacccactttgaactatannagnntgacgatgagaacctta

SEQ ID NO: 26 - DNA, 7754 bp, Homo sapiens
  misc_feature: Incyte ID No: 253946.4
  unsure 3947-3985: a, t, c, g, or other
gcggagccggggcgagcagccaaaaggcccgcggagtcgcgctgggccgccccggcgcagctgaaccgggggccgcgcctgccaggccgacgggtctggcccagcctggcgccaaggggttcgtgcgctgtggagacgcggagggtcgaggcggcgcggcctgagtgaaacccaatggaaaaagcatgacatttagaagtagaagacttagcttcaaatccctactccttcacttactaattttgtgatttggaaatatccgcgcaagatgttgacgttgcagacttggctagtgcaagccttgtttattttcctcaccactgaatctacaggtgaacttctagatccatgtggttatatcagtcctgaatctccagttgtacaacttcattctaatttcactgcagtttgtgtgctaaaggaaaaatgtatggattattttcatgtaaatgctaattacattgtctggaaaacaaaccattttactattcctaaggagcaatatactatcataaacagaacagcatccagtgtcacctttacagatatagcttcattaaatattcagctcacttgcaacattcttacattcggacagcttgaacagaatgtttatggaatcacaataatttcaggcttgcctccagaaaaacctaaaaatttgagttgcattgtgaacgaggggaagaaaatgaggtgtgagtgggatggtggaagggaaacacacttggagacaaacttcactttaaaatctgaatgggcaacacacaagtttgctgattgcaaagcaaaacgtgacacccccacctcatgcactgttgattattctactgtgtattttgtcaacattgaagtctgggtagaagcagagaatgcccttgggaaggttacatcagatcatatcaattttgatcctgtatataaagtgaagcccaatccgccacataatttatcagtgatcaactcagaggaactgtctagtatcttaaaattgacatggaccaacccaagtattaagagtgttataatactaaaatataacattcaatataggaccaaagatgcctcaacttggagccagattcctcctgaagacacagcatccacccgatcttcattcactgtccaagaccttaaaccttttacagaatatgtgtttaggattcgctgtatgaaggaagatggtaagggatactggagtgactggagtgaagaagcaagtgggatcacctatgaagatagaccatctaaagcaccaagtttctggtataaaatagatccatcccatactcaaggctacagaactgtacaactcgtgtggaagacattgcctccttttgaagccaatggaaaaatcttggattatgaagtgactctcacaagatggaaatcacatttacaaaattacacagttaatgccacaaaactgacagtaaatctcacaaatgatcgctatctagcaaccctaacagtaagaaatcttgttggcaaatcagatgcagctgttttaactatccctgcctgtgactttcaagctactcaccctgtaatggatcttaaagcattccccaaagataacatgctttgggtggaatggactactccaagggaatctgtaaagaaatatatacttgagtggtgtgtgttatcagataaagcaccctgtatcacagactggcaacaagaagatggtaccgtgcatcgcacctatttaagagggaacttagcagagagcaaatgctatttgataacagttactccagtatatgctgatggaccaggaagccctgaatccataaaggcataccttaaacaagctccaccttccaaaggacctactgttcggacaaaaaaagtagggaaaaacgaagctgtcttagagtgggaccaacttcctgttgatgttcagaatggatttatcagaaattatactatattttatagaaccatcattggaaatgaaactgctgtgaatgtggattcttcccacacagaatatacattgtcctctttgactagtgacacattgtacatggtacgaatggcagcatacacagatgaaggtgggaaggatggtccagaattcacttttactaccccaaagtttgctcaaggagaaattgaagccatagtcgtgcctgtttgcttagcattcctattgacaactcttctgggagtgctgttctgctttaataagcgagacctaattaaaaaacacatctggcctaatgttccagatccttcaaagagtcatattgcccagtggtcacctcacactcctccaaggcacaattttaattcaaaagatcaaatgtattcagatggcaatttcactgatgtaagtgttgtggaaatagaagcaaatgacaaaaagccttttccagaagatctgaaatcattggacctgttcaaaaaggaaaaaattaatactgaaggacacagcagtggtattggggggtcttcatgcatgtcatcttctaggccaagcatttctagcagtgatgaaaatgaatcttcacaaaacacttcgagcactgtccagtattctaccgtggtacacagtggctacagacaccaagttccgtcagtccaagtcttctcaagatccgagtctacccagcccttgttagattcagaggagcggccagaagatctacaattagtagatcatgtagatggcggtgatggtattttgcccaggcaacagtacttcaaacagaactgcagtcagcatgaatccagtccagatatttcacattttgaaaggtcaaagcaagtttcatcagtcaatgaggaagattttgttagacttaaacagcagatttcagatcatatttcacaatcctgtggatctgggcaaatgaaaatgtttcaggaagtttctgcagcagatgcttttggtccaggtactgagggacaagtagaaagatttgaaacagttggcatggaggctgcgactgatgaaggcatgcctaaaagttacttaccacagactgtacggcaaggcggctacatgcctcagtgaaggactagtagttcctgctacaacttcagcagtacctataaagtaaagctaaaatgattttatctgtgaattcagattttaaaaagtcttcactctctgaagatgatcatttgcccttaaggacaaaaatgaactgaagtttcacatgagctatttccattccagaatatctgggattctactttaagcactacataaactgactttatcctcagactagctgaatgattttgtgctgtttcaggatgtttgcactgaagaaaaacagaaagcttatctgaaatttataaaactttttgttttgctacatagaaaacagaaggtatttgaataataagcagtgatatgcttagtgagcacagctatactgattttgattagaatagtcatcagagtggcttagggacagttaatataaaagaggagcaaggtgtagaccatcatctacttctgctaaaataacttaaaaagaggtccataggccataactacatgagcccagcttttgtaatctgacaaaaaaatgaggagcagcttcgtgtatatcagtgtacacggtattccttaggtcccttccattggtagtgatgctgcgagttattactggagaaaaggaattctagagctttaacttggcagattaaaagtactcattttttattcatcaataattagtaatctcactagttttcaaaaatttgcatattattgacaacctctttgaagatgcatttcacaaactcaacagagtgccatgataagagctagggatcccccaaactatctcaagcatctaaaaaattgccatttttaaaggcttaaattgtagtagtaaaggggaaaacaggaagtagtagtaaaggggaaaaaaaaccaataaagcatctaaaaaattggcatgttaaaaggcttaaattgctannnnnnnnnnnnnnnnnnnnnnnnnnnnnnnnnnnnnnncacacacatatcattgacttttcttaagacttcagagtactgggtagatgaacactttatacagtatatatcttcagcttaaatttgttttgagtattttttttatttttaaataagtaggcaaagatttaaatttttttatttttagtaaatgtttgaggcacactaagacaacttgggcaatatttgccaaaacaaaacagaaccccaaaaaatgtacatcttgttcttagcaaatatcattattgtagagacacttaataaagagatggtattttaatgtctgcagttctgaggtagggtggaacttagttctacattgtgatttaggaatttttaaaaccttttttcttcaagggagaagtgacccaggcctcgagtttagtgctaaagccgctagtgtacttatgctgtcccctaaccaccacgtgcgatatggaagcagatgctaaatataggggttttcttagaaagtaagaggaaattagcaagcgttattagtgattgactactgctatcaagtgaattcaaaggaaacaggtttttatgccatatttaagttacagaaaccaggcatgcttagaatagtttctagaggttattggagaatagaaagctaagaaaacttggtatacatttacaatggaaatataattacactttttactctcagaatattgttcacattagacttcctgtttatcttttatattcttgcatttatataatgcctcatcctttcaaagttctttcacatattatatgatcttctttatgaaaaaaatagatgtttcattctgatatattcagtttcccactttaggcaaaagtagattaatagaatgacgaattcaaagtagatgaggaaaatcaggcacagagaagtaaaggtagggatagacccaaatttacacaacaagataatgacatctccagcttttaagttgatcatcaaaggctgggctggatttgtcttgctgtatgtgtcaggaaatttatacctattacattttccattttctcaaaatttaagtcacatgactaatatttagctgcaactttcctcataacaaatagtgtcatgaagaatgttgtagtgtgaagtttgtacatttcagggtcagatatacaatatgaactcttaatctacaggaatgagaatggaggatcattgaaggccatgatataaacaaatttgcatgttgaagcctgtataaaacatggtacagtgagtgaatatacccccatccccaagaacactttatacatattaaatggatatatgattactgtgcaaaaattcattctggaaatgaacatatatttgagcactaatatgtaatgtacacctgccctaaggagaaaataaattataaaactttttacattcaaaattactttcccaagcatgtcttagaataatctatgtgttgatgcatgtaaattgtactttaggtaggcaaagaaatctggttatttatgtaaaaactagtctaataaagttagttagtggctttatcactttaaatctttagtgtccaaaagtggtgtttaaagtaatagcacatcagaaaaccttgtctggacaaaactagttcactcactgcttctgcacctgcagttgctccctttagggttataaaataatgacccaaatgttacatgtgttgatattataacttgtcagttactgatgtctgtggtatcctaccctcatctctgaaagggataatactgaataattattagaaaactataaaacttcacactttgtaccattaaaacctaaaattttaatcttgtccttttttactatggatcagtcggcactcgggaacagcagcaaggaaaaaaagcaaatttcattcacatgttctgtgttcatacctcttctctacctaattgttcatttaaatttcagccttattccttgataagggattttaccacatgaagtcatccagtgaccctagctcttattgtgaagttagtggagtatacttagaaatgttacaactttaaaatgttacaaaacattcattaaagctcatatttaaagtagagcatctagtttgagaaatagaaatcaattattaaagatgtcttttttctacccatttaactagttaaaaccatgacatgtaaatgtagaagtagaataatcatagaattccctaaaatatttctgtttactaacatatattgaccaagtacatcaagcaggagagatcttccttcattctgttatagtccacatcattctaattttgctcagttgttattaagagcatattcctaaaccatacacttttgtttcaataaagttttattttgttgagatgaataaaataacaaagttataagctgcataagacaaaagttcaattgttcaaaaaaaatttactgggatagctttctattacaggtattgttagattatattgtgctgataagattactttctaaaaaatttgtacttttctgtaaattaaaagaatatggagtcataaaatggcaagtgttttaggattagcctaaaattggacattgtcattgatttcaaagaaggtatgaactagcagtcttacagcctaattcttctttggactggtccttggcagcagttccttttcagactcgataaacagaattcagatgatgtaagtcaaaacaaaactttacaaagccaagcgtattatcttttgcattaacctatttttttccatcatacatgctactagtatgtgcattagcatgatattctcatatacattgcattaaaaattaaaaggtggcagctcagggtgagctcttctgttgctcatttgttcctaaatttttaagggctttttctcagtcaatagtttgtacaaactggttagtttaacttcattacccatttcattaaagttgatgggtcgtgtgatgagatgcatttaaggccgatagtgatagatgttttttttatttcttgaacacaggctttgtctgaatgatgttcttttatctcttgaacacaagctttgaatgataactacaggttttaagtgctgttacattaataccataatgtgatgtgttagaaacaaagggatatttcaaaggtagatatttgaaaattctctagtctcaatatgtatgtgtattgaatatactctaaaaataaatgtgcaatttgctagtaggacaatgcagtgactgactagcattaggtatgtttcttttatatcctagctatgtcccactttcttctaagtgcaatcctttcatgttcacttgctgttttaccccatctactctaacttcatttggaaggcttgtctagagtatagcatgtatttttacctttgcagtgaattgcatgtgctaattgtaaccacagctatttttatgttgacataactccaaatgttatattaaatgttctattatatattagctctaatcccttaagtaaattttaagaaataaatacttgttcaaattttttttctgtatgtggttactatcatctgactatgcatatttgtaacagcatttatcattagtggtgttagctaaataagcatcttagtgtaaatgagatgcttcgtgtgggttttgtgacattttaaatgacataatggaatgtgatttaaaagaaaaccagtacactatcttggtcttaataacatagaatggagatggcaaatttatccactagttttccagatttactatttaatagctgaggtctgaaatcgtagcatcctccctcctagtggacatt

SEQ ID NO: 27 - DNA, 799 bp, Homo sapiens
  misc_feature: Incyte ID No: 348801.1
  unsure 761: a, t, c, g, or other
ctgcagacttgtaggcagcaactcaccctcactcagaggtcttctggttctggaaacaactctagctcagccttctccaccatgagcctcagacttgataccaccccttcctgtaacagtgcgagaccacttcatgccttgcaggtgctgctgcttctgtcattgctgctgactgctctggcttcctccaccaaaggacaaactaagagaaacttgggcgaaaggcaaagaggaaagtctagacagtgacttgtatgctgaactccgctgcatgtgtataaagacaacctctggaattcatcccaaaaacatccaaagtttggaagtgatcgggaaaggaacccattgcaaccaagtcgaagtgatagccacactgaaggatgggaggaaaatctgcctggacccagatgctcccagaatcaagaaaattgtacagaaaaaattggcaggtgatgaatctgctgattaatttgttctgtttctgccaaacttctttaactcccaggaagggtagaattttgaaaccttgattttctagagttctcatttattcaggatacctattcttactgtattaaaatttggatatgtgtttcattctgtctcaaaaatcacattttattctgagaaggttggttaaaagatggcagaaagaagatgaaaataaataagcctggtttcaaccttctaattcttgcctaaacattggactgtactttgcatttttttctttaaaaatttctattctaacacaacttggntgattttcctggctactttatggtattagacatctcat

SEQ ID NO: 28 - DNA, 4151 bp, Homo sapiens
  misc_feature: Incyte ID No: 980611.1
  unsure 1474, 2019-2064, 2651-2685: a, t, c, g, or other
ttcaggcccagtccctgacctgtgtctctgctctctgccttacccctcctgccccactcccaggccatctctgccggacgcggcccacagacctggtgtttgttgtcgacagctctcgcagcgttcggcctgttgaatttgagaaagtgaaggtattcctgtcccaggtcatcgagtcgctggacgtggggcccaatgccacccgggtgggcatggtcaactatgccagcaccgtgaagcaggagttctcgctgcgggctcatgtctccaaggccgcactgctgcaggctgtgcgccgtatccagccgctgtccacaggcaccatgaccggcctggccatccagttcgctatcaccaaagccttcggcgatgcagagggtggtcgttccaggtcccctgacatcagcaaggtacgtgcacgccaccctgctaggatgctgctgtttggaggctcccgctcggagttatgagctttgcctgcagacactttgattcccatgatgccccgtgaggtggccatttcatagcttagagaccccaatttggcgatggggcatcacatccctccgggcatctcagagctgcctgcccgagggaggcgaagcagatggaaagccccccagccacgtctctcagtcagaggaaacgggtctcctcttcggccagccgggtcctcttcccccgggtgccgcctggctgtgcgacccggcagtcctcccgcctctccgggcctcagcctcctctcctggacagtcccgtgggcttccgggagcccggtgtcacaccgccccgcgtgtcgcaggtggtcatcgtggtgacagacgggaggccccaggacagcgtgcaggacgtgtctgcgcgggcccgggccagcggcgtcgagctgttcgccatcggagtgggcagcgtggacaaggccacgctgcggcagatcgccagcgagccgcaggacgaacacgtcgattacgtggagagctacagcgtcatcgagaagctgtccaggaagttccaggaggccttctgcgtggtgtcagacctgtgcgccacaggggaccatgactgtgagcaggtgtgcatcagctcccccggttcctacacctgcgcctgccacgagggcttcactctgaacagcgacggcaagacctgcaatgtctgcagtggtggtggtggcagctcggccactgacctggtcttcctcattgacggatccaagagtgtgaggccagagaaccttgagctggtgaagaagttcatcagtcagatcgtggatacgctggacgtgtcagacaagctggcccaggtggggctggtgcagtactcaagctctgtgcgccaggagttccccctgggtcgcttccacaccaagaaggacatcaaggcggctgtgcggaatatgtcctacatggagaagggcacaatgaccggggctgctctcaagtacctcattgacaattccttcactgtgtccagtggngctaggcccggggcccagaaggtgggcattgtcttcactgatggccggagccaggactacattaatgatgctgccaagaaggccaaagacctcggctttaagatgtttgctgtgggtgtgggcaatgccgtggaggatgagctgagggaaatagcctcagagcctgtggcagagcactacttctacacggctgacttcaagaccatcaaccagataggcaagaagttgcagaagaagatctgtgtggaggaagacccgtgtgcctgcgagtccctggtgaaattccaagccaaagtggaggggctgctgcaggccctgaccaggaaactggaagctgtgagtaagcggctggccatcctggagaacacagttgtctaaggctgcctgtcaccactgtggcctctccaagcgtcctgcacgtgtccgccgtagctttaccattttagtgagggaagccagcccgggggtgggagggggtgtgtctgggtgtgcctattgagagcgtgtaatggcgtttgggagctcgtgtgtgtatgtgtgcgtgnnnnnnnnnnnnnnnnnnnnnnnnnnnnnnnnnnnnnnnnnnnnnncctgagggtgggcatgagtcttgccagaatgtgagtgtgagagtgataatgcaggggtgagtgtgagagggactgcgtttgcatttttataatcaaaagcttaatatattcccatcttttttagttaaccctttcttgactctgagtgctgtgaatttctttactgatttctctattctccggtgagaaacaattaaatgtgatttaacgtaagcagtgaatggggctagaggcagtgtggttatttggggaccagggaaaaggatggatgaagatgtggtgggaggggatggttggaaggatggtaacagtggtggtgacagtgatgacagtgaccacaccaaaaccagctggtgtttgtcctgccttttcagttacatattcatttagttgacctcatttcacttccagtaaccttacccagaaaagactcaaattatccccattacaaatgggaaagctgagagtctaaatgatgaaatgacttgctcagcagtgggtcgctgagagacaggacttgaatctaggactgaagaacatcaaaagaaaaaggcttcagagaaaaagggcaatgacaccagataggnnnnnnnnnnnnnnnnnnnnnnnnnnnnnnnnnnncgttcaggtatcatgtacttacagggcaatggcggtgggggggatggtgctgtatgagacagacgtagttcctgccctaagagacatacagttgagcagggtgctcatgtcacccccaccagccagagggaccagccagaggaaaagagagtgggtttaggtcgtaccaggggtttgtgcctcctcttgatacctgggagccacggggtgagtgtgtgtgtgagatgatgggaagggctccagcctgggcctgggctgccctaggtgcctctcccctcccgcccccaacatgccctgttggagttctgtttgtttcctgtgcacaggcggcatcacccccaacccaaagtccccaacgcagatgcagcagccccacctcagagactgcacaagagaaagactcctggccccatgttcccttcctccagccctatgtggggtctgcaggtcacaccctgagatctcggtcacctcccccaggcccctattggaccagtgctgctccggaatctccatctctgtcctctcagagggggagctttggtgattttctgaacctattcttgtttaatggagcatttttagtgttactactagattcacacttgagagcatgtctaaaaggcttttacaagaagctcagaccacaccgaaagatcttcctcggaggcagttcaaagaggcagaataacaacacgaacggtacccaagagccacatcagtacaacagcacaactacacaagcgcgacttaactggggcacagccaccctcgcccccatgacctgactccacctcctacacagttcaccaagccctttttttttgtctgtccctggggcagcagtttttctgctgtccaaggaggctccttgacacagccacctgaaaagttatgactctgctcattcttccttttttttgaaattatccactcccctttcctccccacacagggggggagggggagaggcagccatgttgatatggactgaaaaggctcagcagtgtgtccccaaggaggaggagagggtcattagcaaaccccatggcctgggagctggtgggcagaagcaacagatgtccctgatgagtggagtcagagatggggtggaagccctgcctgggaataggacctcgttcttccctgccggtgggtggagtagtggcaggaccttgtcaccaggctctgatgaaggcagggaccagcttcttgggatcttttaatcccaaactcttgcccttcactcatcgcagttctccccacggctactccaggtcctcttgaaatccgtcctctccatggacttcccacatccctctctgctctaggtttgattaacagaaggttgtaaatgaaaaccagcatctccctagggcagccatggtctactgacagatggcaagttactttgtaacctgtaattttgtttttttgaattttgtataaataaacaggactaaact

SEQ ID NO: 29 - DNA, 1747 bp, Homo sapiens
  misc_feature: Incyte ID No: 283885.8
caaagaagcaaaaggtgactctgacagcggcagaggccctaaagctttttaagaaccagctgtctccatatgaacaaagtgaaatcctgggctacgcggagctgtggttcctgggtcttgaagccaagaagctcgacacggctcctgagaaatttagcaagacgagttttgatgatgagcatggcttctatctgaaggtcctgcatgatcacattgcctaccgctatgaagttctggagacaatcgggaaggggtcctttggacaggtggccaagtgcttggatcacaaaaacaatgagctggtggccctgaaaatcatcaggaacaagaagaggtttcaccagcaggccctgatggagctgaagatcctggaagctctcagaaagaaggacaaagacaacacctacaatgtggtgcatatgaaggactttttctactttcgcaatcacttctgcatcacctttgagctcctgggaatcaacttgtatgagttgatgaagaataacaactttcaaggcttcagtctgtccatagttcggcgcttcactctctctgttttgaagtgcttgcagatgctttcggtagagaaaatcattcactgtgatctcaagcccgaaaatatagtgctataccaaaagggccaagcctctgttaaagtcattgactttggatcaagctgttatgaacaccagaaagtatacacgtacatccaaagccggttctaccgatccccagaagtgatcctgggccacccacacccctacgacgtggccattgacatgtggagcctgggctgcatcacggcggagttgtacacgggctaccccctgttccccggggagaatgaggtggagcagctggcctgcatcatggaggtgctgggtctgccgccagctggcttcattcagacagcctccaggagacagacattctttgattccaaaggttttcctaaaaatataaccaacaacagggggaaaaaaagatacccagattccaaggacctcacgatggtgctgaaaacctatgacaccagcttcctggactttctcagaaggtgtttggtatgggaaccttctcttcgcatgaccccggaccaggccctcaagcatgcttggattcatcagtctcggaacctcaagccacagcccaggccccagaccctgaggaaatccaattcctttttcccctctgagacaaggaaggacaaggttcaaggctgtcatcactcgagcagaaaagatgagatcaccaaagagactacagagaaaacaaaagatagccccacgaagcatgttcagcattcaggtgatcagcaggactgtctccagcacggagctgacactgttcagctgcctcaactggtagacgctcccaagaagtcagaggcagctgtcggggcggaggtgtccatgacctccccaggacagagcaaaaacttctccctcaagaacacaaacgttttaccccctattgtatgacctttgctgagggtatgtcctgctcctttccaccagtgatttgtattaagacagcacttatattgtacaatacttcagactgttttttttaaatacataaaactttatgttaaaaaactctattaacatggccaattggcatgactcctcttatgagggatgggggaggatgtccttgcacttaaactcattccatatgcatctgtgtgtgtagagggggcgggtagttttgaactctcagtgttacagcatcattaatggaactc

SEQ ID NO: 30 - DNA, 1964 bp, Homo sapiens
  misc_feature: Incyte ID No: 348196.33
ccttaaggggcgggccggggcggggctccgctgccccttcccagaggccgcgcctgctgctgagcagatgcagtagccgaaactgcgcggaggcacagaggccggggagagcgttctgggtccgagggtccaggtaggggttgagccaccatctgaccgcaagctgcgtcgtgtcgccggttctgcaggcaccatgagccaggacaccgaggtggatatgaaggaggtggagctgaatgagttagagcccgagaagcagccgatgaacgcggcgtctggggcggccatgtccctggcgggagccgagaagaatggtctggtgaagatcaaggtggcggaagacgaggcggaggcggcagccgcggctaagttcacgggcctgtccaaggaggagctgctgaaggtggcaggcagccccggctgggtacgcacccgctgggcactgctgctgctcttctggctcggctggctcggcatgcttgctggtgccgtggtcataatcgtgcgagcgccgcgttgtcgcgagctaccggcgcagaagtggtggcacacgggcgccctctaccgcatcggcgaccttcaggccttccagggccacggcgcgggcaacctggcgggtctgaaggggcgtctcgattacctgagctctctgaaggtgaagggccttgtgctgggtccaattcacaagaaccagaaggatgatgtcgctcagactgacttgctgcagatcgaccccaattttggctccaaggaagattttgacagtctcttgcaatcggctaaaaaaaagagcatccgtgtcattctggaccttactcccaactaccggggtgagaactcgtggttctccactcaggttgacactgtggccaccaaggtgaaggatgctctggagttttggctgcaagctggcgtggatgggttccaggttcgggacatagagaatctgaaggatgcatcctcattcttggctgagtggcaaaatatcaccaagggcttcagtgaagacaggctcttgattgcggggactaactcctccgaccttcagcagatcctgagcctactcgaatccaacaaagacttgctgttgactagctcatacctgtctgattctggttctactggggagcatacaaaatccctagtcacacagtatttgaatgccactggcaatcgctggtgcagctggagtttgtctcaggcaaggctcctgacttccttcttgccggctcaacttctccgactctaccagctgatgctcttcaccctgccagggacccctgttttcagctacggggatgagattggcctggatgcagctgcccttcctggacagcctatggaggctccagtcatgctgtgggatgagtccagcttccctgacatcccaggggctgtaagtgccaacatgactgtgaagggccagagtgaagaccctggctccctcctttccttgttccggcggctgagtgaccagcggagtaaggagcgctccctactgcatggggacttccacgcgttctccgctgggcctggactcttctcctatatccgccactgggaccagaatgagcgttttctggtagtgcttaactttggggatgtgggcctctcggctggactgcaggcctccgacctgcctgccagcgccagcctgccagccaaggctgacctcctgctcagcacccagccaggccgtgaggagggctcccctcttgagctggaacgcctgaaactggagcctcacgaagggctgctgctccgcttcccctacgcggcctgacttcagcctgacatggacccactacccttctcctttccttcccaggccctttggcttctgattttttttctcttttttaaaacaaacaaacaaactgttgcagattatgagtgaacccccaaatagggtgttttctgccttcaaataaaagtcacccctgcatggtgaagtcttccctctg

SEQ ID NO: 31 - DNA, 8734 bp, Homo sapiens
  misc_feature: Incyte ID No: 256009.4
  unsure 500: a, t, c, g, or other
ggtgagtggaagggaccccaagtctcctctgctctcaacttggacacatctaagtttgctgggggccttcatttctcaggaccaaaggtggaaggaggtgtgaaaggaggtcagattggactccaggctcctgggctgagtgtgtctgggcctcaaggtcacttggaaagtggatctggaaaagtaacattccctaaaatgaagatccccaaatttaccttctctggccgtgagctggttggcagagaaatgggggtggatgtcacttccctaaagcagaggccagcatccaagctggtgctggagacggcgagtgggaagagtctgaagtcaaactgaaaaagtccaagtttaaaatgcctttcctgagtatttcatctcccaaagtttctatgcctgacgtggagctaaatttgaaaggtcccaaattcaagatgcctgacatgaatatcaaagctcccaagatctccatgcctgatattgacttaaacttgaaaggncccaaagtgaagggcgatgtggatgtttctctgcccaaaatggaaggtgacctcaagggcccagaagctgacatcaagggccccaaagtggacattaatgctccagatgttgatgttcaaggcccagactggcacctgaagatgcccaaggtgaaaatgcccaagttcagcatgcctggcttcaaaggagagggcccagatgtggatgtgaacctgcccaaggctgaccttgatgtctcaggacccaaggtggacattgatgttccagatgtgaatatcgaaggcccagagggaaagttgaaaggtcccaaattcaagatgcctgagatgaacatcaaagcccccaagatctccatgcctgacattgatcttaacctgaaaggacccaaagtgaagggtgatatggatgtgtctctgccaaaagtggaaggtgacatgcaagttcctgacttggatattaaaggccccaaagtggatattaatgccccagatgtggatgttcgaggcccagactggcacctgaagatgcctaagataaaaatgcccaagatcagcatgcctggcttcaaaggagaaggtccagaagtggatgtgaacctgcccaaggctgaccttgacgtctcaggacccaaggtggacgttgatgttccagatgtgaatattgaaggtccagatgcgaaactgaagggccctaaattcaagatgccagagatgaacatcaaagcccccaagatctccatgcctgactttgatttgcatctgaaaggccctaaggtgaaaggagatgtggatgtttctctgcctaagatggaaggtgatctaaaggcccctgaagttgacatcaagggccccaaagtggacattgatgccccagatgtggatgttcatggcccagactggcacctgaagatgcccaaggtgaaaatgcccaaattcagcatgccaggatttaaaggagagggcccagaagtggatgttaatttgcccaaagctgacattgatgtctcaggacccaaagtggacattgacactcctgatattgatattcatggtccagaagggaaactgaagggccccaaatttaaaatgcctgacctgcacctcaaggcaccgaagatctctatgcctgaagttgacctgaatctgaaaggtccaaagatgaagggcgacgtggacgtttctctgcccaaagtggaaggcgacctcaagggccctgaagttgacatcaagggccccaaagtggacattgatgtcccagatgtggacgttcaaggcccagactggcacttaaaaatgcccaaagtgaaaatgcccaagttcagcatgcctggcttcaaaggagagggcccagatgtggatgtgaacctgcccaaggctgaccttgacgtctcaggacccaaggtggacattgatgttcctgatgtgaatatcgaaggtccagatgcgaaactaaagggccctaaattcaagatgcctgagatgaacatcaaagcccccaagatctccatgcctgactttgatttgcatctgaaaggtcccaaggtgaagggtgatgtggatgtttcccttcctaaagtggaaggtgacctcaagggcccagaagttgacatcaagggccccaaagtggacatcgatgcccctgatgtagatgttcatggcccagactggcacctgaagatgcccaaggtgaaaatgcccaaattcagcatgccaggattcaaaggagagggcccagatgtggatgttacccttcctaaggctgacattgagatttctggccccaaagtggacattgatgcccctgatgtcagtatcgaaggtccagatgcaaaactcaagggtccaaagttcaagatgccagagatgaacatcaaggcccccaaaatctccatgcctgacattgactttaacttgaagggtcccaaagtgaaaggtgatgtggatgtctctctgcccaaagtggaaggtgatctcaagggccctgaaattgacataaaaggccccagtttggacattgacacacctgatgtcaatattgaaggtccggaaggaaaattgaaggggcccaaatttaagatgcctgagatgaacatcaaagctcccaaaatctctatgcctgactttgatttgcacctgaaaggtcccaaggtgaagggtgatgtggatgtttcactacctaaggtggaaagtgatctgaaagggccagaggtagacattgaaggtcctgaagggaagctcaaaggtcccaagtttaagatgcctgatgtacatttcaaaagcccacaaatctccatgagtgacattgatttgaatttgaaaggacctaagataaaaggagatatggacatttccgttcctaaactggagggagatctgaaaggtcccaaagtggatgtcaaaggccctaaagtgggcattgacactcctgatattgacattcatggtccagaagggaaactgaagggccccaaatttaaaatgcctgacttacacctcaaggcaccgaagatctctatgcctgaagttgacctgaatctgaaaggtccaaaggtgaagggcgacatggacatttctctgcccaaagtggaaggcgacctcaagggccccgaagttgacatcagggaccccaaagtggacattgatgtcccagatgtggacgttcaaggcccagactggcacctaaaaatgcccaaagtgaaaatgcccaagttcagcatgcctggcttcaaaggagagggcccagatgtggatgtgaacctgcccaaggctgacattgatgtctcaggacccaaagtggacgttgatgttcctgatgtgaatatcgaaggtccagatgcgaaactaaagggccccaagttcaagatgcctgagatgagcatcaaagcccccaagatctccatgcctgatattgacttaaacctgaaaggacccaaagtgaagggcgatgtggatgttacccttcctaaagtggaaggtgacctcaagggcccagaagctgacatcaagggcccaaaagtggacatcaacacccctgatgtggatgttcatggcccagactggcacctgaagatgcccaaggtgaaaatgcccaaattcagcatgcctggcttcaaaggagagggcccagatgtggatgtgaacctgcccaaggctgacattgatgtctcaggacccaaagtggacgttgatgttcctgatgtgaatatcgaaggtccagatgcgaaactaaagggccccaagttcaagatgcctgagatgagcatcaaagcccccaagatctccatgcctgatattgacttaaacctgaaaggacccaaagtgaagggcgatgtggatgttacccttcctaaagtggaaggtgacctcaagggcccagaagctgacatcaagggcccaaaagtggacatcaacacccctgatgtggatgttcatggcccagactggcacctgaagatgcccaaggtgaaaatgcccaaattcagcatgcctggcttcaaaggagaaggtccagatgtggatgtgagcctgcccaaggccgacatcgatgtctcgggacccaaggtggacgttgatattccagatgtgaatatcgaaggtccagacgcaaaactgaagggccccaagttcaagatgcctgaaataaatatcaaagctcccaagatctccatacctgatgttgacctggatttgaaaggacccaaagtaaaaggagattttgatgtgtctgtccctaaggttgaagggactttgaaaggcccagaagtagatcttaaaggtccacgtctggatttcgaaggccctgatgccaaactcagtggcccatctttgaagatgccatcgctggagatatctgctcctaaagtaactgctcctgatgttgatttgcatctcaaggcaccaaaaattggattttcaggtccgaagttagaaggtggtgaagtggacctcaagggacccaaagttgaagctccaagcttagatgtacacatggacagcccagatattaacatcgaagggccagatgttaaaatccccaaatttaagaaacccaagtttggatttggggcaaaaagccccaaagctgacatcaagtcaccttcactggatgtcactgttcctgaggcagagctgaaccttgagactcctgaaattagtgttggtggcaagggcaagaaaagtaagtttaaaatgcctaaaattcatatgagtggtcctaagattaaggccaaaaaacagggatttgacctgaatgttcctgggggtgaaattgatgccagcctcaaggctccggatgtagatgtcaacatcgcagggccggatgctgcactcaaagtcgacgtgaaatcgcccaaaaccaagaaaacgatgtttggaaaaatgtacttcccagatgtagagtttgacattaaatcacctaaatttaaagctgaggcccctctccctagccccaaactggagggtgaactccaggcacctgatctggaactttctttgccagcgattcacgtcgaaggtcttgacatcaaggcgaaggctcccaaggtcaagatgccagatgtggacatctcagtgccaaaaatagagggtgacctgaaaggccccaaagtgcaggcaaacttgggtgcacctgacatcaacatcgaaggcctagatgctaaagtcaaaacaccgtccttcggcatttctgcccctcaagtctccatccctgatgtgaatgtaaacttgaaaggaccaaagataaagggtgatgtccccagcgtgggactggaaggaccagatgtagatctgcaaggtccagaagcaaaaattaagttccccaagttttccatgcccaagatcggcatcccaggtgtgaaaatggagggtgggggagccgaggtccatgcccagctaccctctcttgaaggagacttgagaggaccagatgttaagctcgaagggcccgatgtttctctaaaggggccaggagtagacttgccttcagtgaacctctctatgccaaaagtctctgggcctgaccttgatctgaacttgaaaggaccaagtttgaagggagacctggatgcatctgttcccagcatgaaggtgcatgctccagggctcaacctcagtggtgtcggtggcaaaatgcaggtgggaggagacggtgtgaaagtgccagggatcgatgccacaacaaagcttaacgttggggcaccagatgtgacactgaggggaccaagcctgcagggagatctggctgtctctggtgacatcaaatgccctaaagtatccgtaggagctcctgatctaagcttggaggcatccgaaggcagcattaaacttcccaaaatgaagctgccccaatttggcatctctactccggggtccgacttgcacgtcaatgccaaggggccacaggtttctggcgaactgaaggggccaggtgtggatgtgaacctgaaagggcctcggatttcagcaccgaatgtggactttaacttggaaggaccaaaagtgaaagggagccttggggccactggtgagatcaaaggccccactgtcggaggaggtcttccaggcattggtgttcaaggcctagaaggaaacctccagatgcctggaattaagtcctctggatgtgatgtgaacctgccaggcgtgaatgtgaaactcccaactgggcagatttctgggcctgaaatcaaaggtggtctgaaaggttcagaagtaggtttccatggggctgctcctgatatcagtgtgaaggggcctgcctttaatatggcatctcctgagtcagattttggcatcaacttgaagggcccaaaaatcaaaggaggtgcggatgtttcagggggtgtcagtgccccagacatcagccttggtgaagggcatttgagtgttaaaggttccgggggtgagtggaagggaccccaagtctcctctgctctcaacttggacacatctaagtttgctgggggccttcatttctcaggaccaaaggtggaaggaggtgtgaaaggaggtcagattggactccaggctcctgggctgagtgtgtctgggcctcaaggtcacttggaaagtggatctggaaaagtaacattccctaaaatgaagatccccaaatttaccttctctggccgtgagctggttggcagagaaatgggggtggatgttcacttccctaaagcagaggccagcatccaagctggtgctggagacggcgagtgggaagagtctgaagtcaaactgaaaaagtccaagatcaaaatgcccaagtttaatttttccaaacctaaagggaaaggtggtgtcactggctcaccagaagcatcaatttctgggtccaaaggtgacctgaaaagttcaaaggccagcctgggctctctggaaggagaggcagaggccgaagcctcttcaccgaaaggcaaattctccttatttaaaagtaagaagccacggcaccgctcaaattcattcagtgatgaaagagagttctctggaccttccaccccgacggggacgctggagtttgaaggtggggaagtgtctctggaaggtgggaaagttaaagggaaacacgggaagctgaaattcggtacctttggtggattggggtcaaagagcaaaggtcattatgaggtgactgggagcgatgatgagacaggcaagttacaggggagtggggtgtccctggcctctaagaagtcccgactgtcctcctcttctagcaatgacagtgggaataaggttggcatccagcttcccgaggtggagctgtcagtttccacaaagaaagagtagcaggcctttgtatgtgtgtacatatatatatatataacaaaacatcagccttgggtggtgtgttcctatataaactccaaagggaaacacaccgactgcctcagcaatcatgcaaagaccttgcctggcccggtggcaagcgctgaaaaaccgaccgcctgtaggctcctggaactatacagataggtaaagagttccaagttcgtccagcccatgtgcaaagtcaacagtatttgccttaagatttcatatatatatatttttttgcattgactgctgagagctcctgtttactaagcaagcttttgtgtttattatcctcatttttactgaacattgttagttttggggtaatggaaacccactttttcattgtaatgactttgggggcttttgttagtaagggtgggtggggtgatgggttgcagacggaggtcaggtcttcctctttcctgagactggatctgttcaaacagcaaacgcccacagatggcccagaggtggtggtagtcagggtgtgtgggtgtttttagggttctttagtgttgtttctttcacccaggggtggtggtcccagccagtttggtgctgacggtgagaggaaattagaatctgtttgcaaattgtccaacccaccccctcaacatgaggggcttccattttctgtgttttgtaagggaactgtttccttcatgccgccatgttcctgatattagttctgatttctttttaacaaatgttatcatgattaagaaaatttccagcactttaatggccaattaactgagaatgtaagaaaattgatgctgtacaaggcaaataaagctgtttattaaccttgtacagcatcaattttcttacattttctgtgttttgtaagggaactgtttccttcatgccgccatgttcctgatattagttctgatttctttttaacaaatgttatcatgattaagaaaatttccagcactttaatggcctattggtactttggggtgctgatacccaaaacagatgcaatcttctctccaaggaagtcacacactgagagagttgatgtagcagcccgaagcatgtaaaaccataagtagggaccccaggtaagttttgtcggatcaacagtaggcaaaacatctttcttctccaggccatcaacttcgtcttcatctgtgctatattcttccattgtttcaccactaacaaagtggatgactctccttgggactttcttcttttttcctatgactcccagttctacattttcaaagcctctttcgttactcatctgccatataacctgagcgcccgcgcggccacgacacgaggaattcgcccacgcaggaggcgcggcgctccggaggccccagggttatgagactatcactgctcaggacctactaacaacaaagatttaattaagatataagatgtaaattgatacaagt

SEQ ID NO: 32 - DNA, 2753 bp, Homo sapiens
  misc_feature: Incyte ID No: 481594.12
ggcaaatctttatcagccactgccttctgctgccaggaagccagctagagtggtctttaaagaaaactgggcatctcctgctacttaaaatcaaaaactacctaaaataaagattataaaaaagtaaggatgaatggatggtctttgattggcggcgctggtgacgcccgtcatggttttggaaggacccttttggaactaaagctggtgacgcagcgcgcagaggaatcgcccggctaagcttggccctggcagatgggtcgcaggaacaggagccagaggaagagatagccatggaggacagccccactatggttagagtggacagccccactatggttaggggtgaaaaccaggtttcgccatgtcaagggagaaggtgcttccccaaagctcttggctatgtcaccggtgacatgaaagaacttgccaaccagcttaaagacaaacccgtggtgctccagttcattgactggattctccggggcatatcccaagtggtgttcgtcaacaaccccgtcagtggaatcctgattctggtaggacttcttgttcagaacccctggtgggctctcactggctggctgggaacagtggtctccactctgatggccctcttgctcagccaggacaggtcattaatagcatctgggctctatggctacaatgccaccctggtgggagtactcatggctgtcttttcggacaagggagactatttctggtggctgttactccctgtatgtgctatgtccatgacttgcccaattttctcaagtgcattgaattccatgctcagcaaatgggacctccccgtcttcaccctccctttcaacatggcgttgtcaatgtacctttcagccacaggacattacaatccgttctttccagccaaactggtcatacctataactacagctccaaatatctcctggtctgacctcagtgccctggagttgttgaaatctataccagtgggagttggtcagatctatggctgtgataatccatggacagggggcattttcctgggagccatcctactctcctccccactcatgtgcctgcatgctgccataggatcattgctgggcatagcagcgggactcagtctttcagccccatttgagaacatctactttggactctggggtttcaacagctctctggcctgcattgcaatgggaggaatgttcatggcgctcacctggcaaacccacctcctggctcttggctgtgccctgttcacggcctatcttggagtcggcatggcaaactttatggctgaggttggattgccagcttgtacctggcccttctgtttggccacgctattgttcctcatcatgaccacaaaaaattccaacatctacaagatgcccctcagtaaagttacttatcctgaagaaaaccgcatcttctacctgcaagccaagaaaagaatggtggaaagccctttgtgagaacaagccccatttgcagccatggtcacgagtcatttctgcctgactgctccagctaacttccagggtctcagcaaactgctgtttttcacgagtatcaacttttcaaatggaagccagatttcaaaacccctttggtaacactggaacgagcaagcgagaacacacctttcaaggagcctcaccaaacctgggagatacagactgcatgtgtttaccccggaaaatggaacgaaaagagagactatccatactgggattcagaaaagagaggattggacctcagggcttcctgatgcatcaggagattctctggagttctcaattgttgtcctccacgcctgtgcacgatggcccaataggggattgacccaactccggagcagtggaagcagattgcttctgtcatgaagcaccggtttctgttccccttctttgactcagcctatcagggcttcgcatctggaaacctggagagagatgcctgggccattcgctattttgtgtctgaaggcttcgagttcttctgtgcccagtccttctccaagaacttcgggctctacaatgagagagtcgggaatctgactgtggttggaaaagaacctgagagcatcctgcaagtcctttcccagatggagaagatcgtgcggattacttggtccaatccccccgcccagggagcacgaattgtggccagcaccctctctaaccctgagctctttgaggaatggacaggtaatgtgaagacaatggctgaccggattctgaccatgagatctgaactcagggcacgactagaagccctcaaaacccctgggacctggaaccacatcactgatcaaattggcatgttcagcttcactgggttgaaccccaagcaggttgagtatctggtcaatgaaaagcacatctacctgctgccaagtggtcgaatcaacgtgagtggcttaaccaccaaaaatctagattacgtggccacctccatccatgaagcagtcaccaaaatccagtgaagaaacaccacccgtccagtaccaccaaagtagttctctgtcatgtgtgttccctgcctgcacaaacctacatgtacataccatggattagagacacttgcaggacttaaaagctgctctggtgaggcagctctgtttaaaccggccccccatgaagaggatatcccttgagacgaatttggagactgggattagaacctttggaggtcaaagcaaattgaagtttttatttaagaataaaagaatatttttgacatgaaaaaaaaaaaaaaaaagg

SEQ ID NO: 33 - DNA, 1704 bp, Homo sapiens
  misc_feature: Incyte ID No: 978788.1
  unsure 216-390, 846-889, 1593: a, t, c, g, or other
tacaaagttttaagaaagccagcatctcagaaaggcctttcaaacaaggacacttaattagccatcttatgtataagaaaagaaatataaagaacatgaaaatttaaaaacagatttggcagttttataacagtctaggaggtggtgttattttttcctattaagaattagagggcaggttaggaataaataaaatacagtttgaaaataatgagnnnnnnnnnnnnnnnnnnnnnnnnnnnnnnnnnnnnnnnnnnnnnnnnnnnnnnnnnnnnnnnnnnnnnnnnnnnnnnnnnnnnnnnnnnnnnnnnnnnnnnnnnnnnnnnnnnnnnnnnnnnnnnnnnnnnnnnnnnnnnnnnnnnnnnnnnnnnnnnnnnnnnnnnnnnnnnngcacttcccctactgattgctgccttctctgtggctacaagggacccacagaattacagggaagttacagggaagcaggtttcatctcaatattgggagagatttcaaacaatcacacctgcctgagaaggagtgggctgtcactaggaatttttattcccagtccgtcaggaattttgtagaagggcttcatgtgctggtaccaataggacaggaagattttaatcagctttactatctatgtttttttatggaaactgtgtgtatgtatacatacattttccaaaaagaaaaattaaatgattatagagattatgtttttcagactactcacgtatctgcttttcttactccccacctctgctgataattcctagttcattggtttttcccccacactggaattacctggggagcttaaaaaaccctgatgcctgggtcccaccctcagagatnnnnnnnnnnnnnnnnnnnnnnnnnnnnnnnnnnnnnnnnnnnntgatatgaatgcagcctgggcactgggaaatttaaaaactccccagataattctgtgcagccaaggttgagacctcctagtctagagctttgctatacacagggtggtccacaagccaggagcatcagcatcacttggcagcgccttagagattcagaccccagacccactgaatctgaccctgcattttcactagaccccaggtgatcagctgcactagactcaacctctaaaccaagacctcccaccctcacagtctatgatcctttagtgaccctcagctgagtcctgtgctgaactgtgtttgttctccttgagcacatgcccgctgaccagggacagactggatgagcaagcaacctgctggctatggagaagagccaggctgggtaaatgtttgctgtgactaagccaggatcaaagaactgcctgttgcttgcactggctggcactgagcttgccactctgtgaactgtgcttccttcccctgcatggacctgtgcctcagtcactattatccgcaggccttctccaagggcagccctctccttgtttatccctcttaagcctgcgtgcaggaaggcacattaaccctgtggccccctgcaggcaggagggtgttgggtgcccttacctaccttgccctttttcttgtaccgtaggctgtgccgtttatgagtaagtgatgtgtgtctgtgtgtgtntctagaagtgctgcactcaccttgtgttattggaggttgtgtaaccccctagctttgagcctggtctcagatgttccttttccgttctctgtccagccgttaacgccccca

SEQ ID NO: 34 - DNA, 5701 bp, Homo sapiens
  misc_feature: Incyte ID No: 335171.1
ctcacccggcgggggagagaagccctctggacagcttctagagtgtgcaggttctcgtatccctcggccaagggtatcctctgcaaacctctgcaaacccagcgcaactacggtcccccggtcagacccaggatggggccagaacggacaggggccgcgccgctgccgctgctgctggtgttagcgctcagtcaaggcattttaaattgttgtttggcctacaatgttggtctcccagaagcaaaaatattttccggtccttcaagtgaacagtttggctatgcagtgcagcagtttataaatccaaaaggcaactggttactggttggttcaccctggagtggctttcctgagaaccgaatgggagatgtgtataaatgtcctgttgacctatccactgccacatgtgaaaaactaaatttgcaaacttcaacaagcattccaaatgttactgagatgaaaaccaacatgagcctcggcttgatcctcaccaggaacatgggaactggaggttttctcacatgtggtcctctgtgggcacagcaatgtgggaatcagtattacacaacgggtgtgtgttctgacatcagtcctgattttcagctctcagccagcttctcacctgcaactcagccctgcccttccctcatagatgttgtggttgtgtgtgatgaatcaaatagtatttatccttgggatgcagtaaagaattttttggaaaaatttgtacaaggcctggatataggccccacaaagacacaggtggggttaattcagtatgccaataatccaagagttgtgtttaacttgaacacatataaaaccaaagaagaaatgattgtagcaacatcccagacatcccaatatggtggggacctcacaaacacattcggagcaattcaatatgcaagaaaatatgcctattcagcagcttctggtgggcgacgaagtgctacgaaagtaatggtagttgtaactgacggtgaatcacatgatggttcaatgttgaaagctgtgattgatcaatgcaaccatgacaatatactgaggtttggcatagcagttcttgggtacttaaacagaaacgcccttgatactaaaaatttaataaaagaaataaaagcgatcgctagtattccaacagaaagatactttttcaatgtgtctgatgaagcagctctactagaaaaggctgggacattaggagaacaaattttcagcattgaaggtactgttcaaggaggagacaactttcagatggaaatgtcacaagtgggattcagtgcagattactcttctcaaaatgatattctgatgctgggtgcagtgggagcttttggctggagtgggaccattgtccagaagacatctcatggccatttgatctttcctaaacaagcctttgaccaaattctgcaggacagaaatcacagttcatatttaggttactctgtggctgcaatttctactggagaaagcactcactttgttgctggtgctcctcgggcaaattataccggccagatagtgctatatagtgtgaatgagaatggcaatatcacggttattcaggctcaccgaggtgaccagattggctcctattttggtagtgtgctgtgttcagttgatgtggataaagacaccattacagacgtgctcttggtaggtgcaccaatgtacatgagtgacctaaagaaagaggaaggaagagtctacctgtttactatcaaaaagggcattttgggtcagcaccaatttcttgaaggccccgagggcattgaaaacactcgatttggttcagcaattgcagctctttcagacatcaacatggatggctttaatgatgtgattgttggttcaccactagaaaatcagaattctggagctgtatacatttacaatggtcatcagggcactatccgcacaaagtattcccagaaaatcttgggatccgatggagcctttaggagccatctccagtactttgggaggtccttggatggctatggagatttaaatggggattccatcaccgatgtgtctattggtgcctttggacaagtggttcaactctggtcacaaagtattgctgatgtagctatagaagcttcattcacaccagaaaaaatcactttggtcaacaagaatgctcagataattctcaaactctgcttcagtgcaaagttcagacctactaagcaaaacaatcaagtggccattgtatataacatcacacttgatgcagatggattttcatccagagtaacctccagggggttatttaaagaaaacaatgaaaggtgcctgcagaagaatatggtagtaaatcaagcacagagttgccccgagcacatcatttatatacaggagccctctgatgttgtcaactctttggatttgcgtgtggacatcagtctggaaaaccctggcactagccctgcccttgaagcctattctgagactgccaaggtcttcagtattcctttccacaaagactgtggtgaggacggactttgcatttctgatctagtcctagatgtccgacaaataccagctgctcaagaacaaccctttattgtcagcaaccaaaacaaaaggttaacattttcagtaacgctgaaaaataaaagggaaagtgcatacaacactggaattgttgttgatttttcagaaaacttgttttttgcatcattctccctaccggttgatgggacagaagtaacatgccaggtggctgcatctcagaagtctgttgcctgcgatgtaggctaccctgctttaaagagagaacaacaggtgacttttactattaactttgacttcaatcttcaaaaccttcagaatcaggcgtctctcagtttccaagccttaagtgaaagccaagaagaaaacaaggctgataatttggtcaacctcaaaattcctctcctgtatgatgctgaaattcacttaacaagatctaccaacataaatttttatgaaatctcttcggatgggaatgttccttcaatcgtgcacagttttgaagatgttggtccaaaattcatcttctccctgaaggtaacaacaggaagtgttccagtaagcatggcaactgtaatcatccacatccctcagtataccaaagaaaagaacccactgatgtacctaactggggtgcaaacagacaaggctggtgacatcagttgtaatgcagatatcaatccactgaaaataggacaaacatcttcttctgtatctttcaaaagtgaaaatttcaggcacaccaaagaattgaactgcagaactgcttcctgtagtaatgttacctgctggttgaaagacgttcacatgaaaggagaatactttgttaatgtgactaccagaatttggaacgggactttcgcatcatcaacgttccagacagtacagctaacggcagctgcagaaatcaacacctataaccctgagatatatgtgattgaagataacactgttacgattcccctgatgataatgaaacctgatgagaaagccgaagtaccaacaggagttataataggaagtataattgctggaatccttttgctgttagctctggttgcaattttatggaagctcggcttcttcaaaagaaaatatgaaaagatgaccaaaaatccagatgagattgatgagaccacagagctcagtagctgaaccagcagacctacctgcagtgggaaccggcagcatcccagccagggtttgctgtttgcgtgaatggatttctttttaaatcccatattttttttatcatgtcgtaggtaaactaacctggtattttaagagaaaactgcaggtcagtttggaatgaagaaattgtggggggtgggggaggtgcggggggcaggtagggaaataatagggaaaatacctattttatatgatgggggaaaaaaagtaatctttaaactgggctggcccagagtttacattctaatttgcattgtgtcagaaacatgaaatgcttccaagcatgacaacttttaaagaaaaatatgatactctcagattttaagggggaaaactgttctctttaaaatatttgtctttaaacagcaactacagaagtggaagtgcttgatatgtaagtacttccacttgtgtatattttaatgaatattgatgttaagaggggaaaacaaaacacaggttttttcaatttatgctgctcatccaaagttgccacagatgatacttccaagtgataattttatttataaactaggtaaaatttgttgttggttccttttagaccacggctgccccttccacaccccatcttgctctaatgatcaaaacatgcttgaataactgagcttagagtatacctcctatatgtccatttaagttaggagagggggcgatatagagactaaggcacaaaattttgtttaaaactcagaatataacatgtaaaatcccatctgctagaagcccatcctgtgccagaggaaggaaaaggaggaaatttcctttctcttttaggaggcacaacagttctcttctaggatttgtttggctgactggcagtaacctagtgaatttttgaaagatgagtaatttctttggcaaccttcctcctcccttactgaaccactctcccacctcctggtggtaccattattatagaagccctctacagcctgactttctctccagcggtccaaagttatcccctcctttacccctcatccaaagttcccactccttcaggacagctgctgtgcattagatattaggggggaaagtcatctgtttaatttacacacttgcatgaattactgtatataaactccttaacttcagggagctattttcatttagtgctaaacaagtaagaaaaataagctcgagtgaatttctaaatgttggaatgttatgggatgtaaacaatgtaaagtaaaacatctcaggatttcaccagaagttacagatgaggcactggaagccaccaaattagcaggtgcaccttctgtggctgtcttgtttctgaagtacttaaacttccacaagagtgaatttgacctaggcaagtttgttcaaaaggtagatcctgagatgatttggtcagattgggataaggcccagcaatctgcattttaacaagcaccccagtcactaggatgcagatggaccacactttgagaaacaccacccatttctactttttgcaccttattttctctgttcctgagcccccacattctctaggagaaacttagaggaaaagggcacagacactacatatctaaagctttggacaagtccttgacctctataaacttcagagtcctcattataaaatgggaagactgagctggagttcagcagtgatgcttttagttttaaaagtctatgatctggacttcctataatacaaatacacaatcctccaagaatttgacttggaaaaaaatgtcaaaggaaaacaggttatctgcccatgtgcatatggacaaccttgactaccctggcctggcccgtggtggcagtccagggctatctgtactgtttacagaattactttgtagttgacaacacaaaacaaacaaaaaaggcataaaatgccagcggtttatagaaaaaacagcatggtattctccagttaggtatgccagagtccaattcttttaacagctgtgagaatttgctgcttcattccaacaaaattttattt

SEQ ID NO: 35 - DNA, 1039 bp, Homo sapiens
  misc_feature: Incyte ID No: 998433.2
cttagtcgcgggctgactggtgtttatccgtcactcgccgaggttccttgggtcatggtgccagcctgactgagaagaggacgctcccgggagacgaatgaggaaccacctcctcctactgttcaagtacaggggcctggtccgcaaagggaagaaaagcaaaagacgaaaatggctaaattcgtgatccgcccagccactgccgccgactgcagtgacatactgcggctgatcaaggagctggctaaatatgaatacatggaagaacaagtaatcttaactgaaaaagatctgctagaagatggttttggagagcaccccttttaccactgcctggttgcagaagtgccgaaagagcactggactccggaaggacacagcattgttggttttgccatgtactattttacctatgacccgtggattggcaagttattgtatcttgaggacttcttcgtgatgagtgattatagaggctttggcataggatcagaaattctgaagaatctaagccaggttgcaatgaggtgtcgctgcagcagcatgcacttcttggtagcagaatggaatgaaccatccatcaacttctataaaagaagaggtgcttctgatctgtccagtgaagagggttggagactgttcaagatcgacaaggagtacttgctaaaaatggcaacagaggagtgaggagtgctgctgtagatgacaacctccattctattttagaataaattcccaacttctcttgctttctatgctgtttgtagtgaaataatagaatgagcacccattccaaagctttattaccagtggcgttgttgcatgtttgaaatgaggtctgtttaaagtggcaatctcagatgcagtttggagagtcagatctttctccttgaatatctttcgataaacaacaaggtggtgtgatcttaatatatttgaaaaaaacttcattctcgtgagtcatttaaatgtgtacaatgtacacactggtacttagagtttctgtttgattcttttttaataaactactctttgattt

SEQ ID NO: 36 - DNA, 1387 bp, Homo sapiens
  misc_feature: Incyte ID No: 221928.9
  unsure 419, 433, 488: a, t, c, g, or other
gtaaatatttgtattagccggagccggctcgctaatggtggacgcgtgaggcggaggcgcgggcggcggagggaggccggagcgggcagcgcggcggcgccatgtccgtgaacatggacgagctcaagcaccaggtcatgatcaaccagttcgtgctgacggcgggctgcgcggccgaccaggcgaacaactgctgcaggcggcccactggcagttcgagacagccctcagcgcctttttccaggagaccaacatcccctacagccaccatcaccaccagatgatgtgcacccccgccaatacccctgctacaccccccaacttccctgacgctctcaccatgttctcccgtctcaaggcctccgagagcttccacagcggtggcagcggcagcccgatggccgcgacagccacgtcanccccgccacacttnccccatgccgccaccagcagctctgcggcctccagctggcccacggcggcctggnccccggggggcccacagcaccaccagccacagccgcccctgtgggactccaacacccccttctccggcttcagactggccacccctgggccccccaacaggccacctcagaacccagggcccaccctgccatggaggcagagagataagggaggcccctcccccctcccggaggccaggaccccgtggggcgggggagaggacgtctctgcgggcccccttcaccccttttctgtctgcaccccttgttccccggagccctggaggggagagcgcggactctagccaggcagggacacgtctggtgccagaacacgcagctgcccacacgcaaggtcatggccccagcggccccggcacatggagtggttcagagcggcctgggtgcctggcggacagaacttcagagaccacgcagccttccttcgaagacgcacctgcccagcccagcccaggggtgccgtggaggaccaccctggcggagacattgctgatccctggcttggagctccttgggggccggcaggcctcgacccccaccctagggaatgcagagcctctccgcatgtgtgcgcgtggccgtgtctgtgtatttctacgtgtgtcgctcttcagaagcaacctagttcctggggcagctggactttgcatgttagtgtgagcccccagccccctgcccgccgccccctccccagggccctgcctcctccccaccccctcgtcagccagcgttgctgttccttgcagagaaaaggattgtgggaaactccaggactcttcccaccgcctcccagcgcctgcctgctggggctgcctgcatgcctcccctgcacctgggggtacccgcatccacttcctttcccccttttaacaaaagagaagaacgaattccaaaccact

SEQ ID NO: 37 - DNA, 4720 bp, Homo sapiens
  misc_feature: Incyte ID No: 331291.3
ttaggaggagatccaacttggtccttttttctcactttctgcactttgctcatatggaatcttgctgctgcacagctcatgctagcctgtcactcttccttctactcccaatcatccttgccttctactaccttcatcatctaaccatctgaaagatttccaccttggagtgtgggtaatggaaccccaaggaggcttctttctctgtctttctgctgggctctgaagaggcagaggaggcaggggaggctccaggctgtggggccatgacagcagtgtgagtctctcctgcttccccaggtacttccagtgcccgccaagtttggtctctttgcatccatccacaaggtgatccatactggcttcccatccaccagcccagccaaggccaagaagaccaaacgtatggccatgggtgtgtcagcactgacccacagtcccagcatttcctccatcagttccatcggttccatggcctcctttgtaggggggcggcccagccgcagtggcctgctcacggagacctcttcacgctacgcccgcaagatctcgggcaccacggccttgcaggaggcactgaaggagaagcagcagcacattgagcagctgctggctgaacgagacctggaacgggctgaggtggccaaggccacaagccacatctgcgaggtggagaaggagattgccctgctcaaggcacagcatgagcagtatgttgcagaagccgaggagaagctgcagcgagcccggctgctcgtggagagcgtgcggaaagagaaggtggacctgtccaaccagctggaggaggagaggaggaaggtggaggatctgcagttccgcgtggaggaggagtccatcaccaagggagacctggagacccagacgcagctggagcacgcgcgcattggggagctggaacagagcctgctactggagaaggcgcaggccgagcggctgctccgagaattagcggacaacaggctgaccacagtggccgagaagtcgcgcgtgctgcagctggaggaggagctcaccctgcgccgaggtgaaatcgaggagctccagcagtgcctgttgcactcgggtcccccacctccggaccacccagacgccgccgagatcctgcggctacgggagcggctgctctcggccagcaaggaacaccagagggagagtggggtgctgcgggataaatacgagaaggccctgaaggcctaccaggcggaggtggacaagctccgcgcggccaacgagaagtacgcacaggaggtggcgggcctgaaggacaaggttcagcaggccaccagcgagaacatggggctaatggacaactggaaatccaagctggactcgctggcctcggaccaccagaagtccctggaggacctcaaagccaccctgaactcgggcccaggcgcccagcagaaggagatcggcgagctgaaggcagtgatggagggcatcaagatggagcaccagctggagctgggtaacttgcaggccaagcatgacctggagaccgccatgcacgtgaaggagaaggaggccctgcgagagaagctgcaggaggcccaggaggagctggctgggctgcagcggcactggcgggcccagctggaggtgcaagccagccagcaccggctggagctgcaggaggcccaggaccagcgccgggatgccgagctgcgtgtgcacgagctggaaaaactggacgtggagtaccggggccaggcgcaggctatcgagttcctcaaggagcagatctcgctggccgagaagaagatgttggactacgagcggctgcagcgggcagaagcccagggcaaacaggaggtcgagagtttgcgggagaagctcctggtggctgagaacagactccaggcggtcgaggccctgtgctcctcccagcacacccacatgattgagtcgaatgacatttcagaggagacgatcaggacgaaggaaactgtggagggcctgcaggacaagctgaacaagagggacaaagaggtgacagccttgacctcccagaccgagatgctcagggcccaagtaagtgcgctggagagcaagtgtaagtcaggcgagaagaaggtggacgccctcctgaaggagaagcggcgcctggaggcagagctggagaccgtgtcccggaagacccatgacgcctcgggccagctagtcctcatcagccaggagctgctgcggaaggagcggagcctgaacgaactgcgggtgttgctgctggaggccaatcgtcactccccagggccggagagggacctgagccgtgaggtacacaaggctgagtggcggatcaaggagcagaaactcaaggatgacatccggggcctgcgtgaaaagctgaccgggctggacaaagagaaatccctgtcggatcagaggcgctactccctcatcgacccgtcctcggcgcccgagcttctgcggctgcagcaccagctgatgagcacggaggacgccctgcgggatgcgctggaccaggctcagcaggtggagaagctgatggaggccatgaggagctgccctgacaaggcccagaccatcggcaattccggttctgcaaacggcatccaccagcaggacaaagctcagaaacaagaggacaagcactgatcctgaggggatactgtggagcagcccagtccacaccagagccccacgcggctgcccggcagtacctcctccaggcaggagccgggactgtcactttggagacaaaacagtgtttgtaacaataacgtactcaccgccgcggacaatcccccaccccgatccctcgccagaccaggacgcttcctcaagcccagccttctacagagagtgtgaacggtacagccctggcctgacccggggaccttcagcctggacacccggcagcttctggagtttgtcagtggaggcagaggggatccggccaggcccctctgtccagaaggagctgccctgaggaccatcttagcggccctgtcctctttttccgcccattctccctcgggtctccccagaggggccggcgggggctggggagggggtaagtttatccatgcagacaccaagggggagcatccagtctttaagagccaagtgggggccccttttccgaagccacttccaggccaaggcagtcgccagggcttcttgtccccaccttctgaaccttcttcaaacagtagtacaagctcccctcagccagcctgcctgcccagcgaggcccccaggttcaaggtgttggcgggggcggagggcaggggaacgggatccttctcccgctgcccaccaacaccaacacacacacacctctaagctgctggccgaagatgtcaccaaggccaaagacacagtattatgaaggtttggaaacccctctcctcacctcccaccgtgaccttgggcaaaccctggctcggagcccagggcagaggcagctcagagtggaggctctaggcaggtttgacaaaggtcagtaatacggtttcccctggggttgaccagatgttccaaaatatctgcatccacctggagatgcagctaagtgggtccttatgtacacaccacgttcacacacacacagagggaccacgtgtgcacgcatgaccgtgtgggtggcggcgtttgctgtgaaccatgctcaggccacacagagacacatacttggtttctgggactgagacccaggcctggcaggaccgtgcctacagatactgcaaacgttcctacagcctagaggtgcgtatacacacccaagtacacgcagccaggcattcaggggtgtgtttgccacatggagcatcccttcctggtcttgccaggcacctgcacagagcgtctccagccccatctcctaacgggggctgggggtaagagaaatctaactgcgctcccccaacccctcgccctgccatcttcccctcaagcctgctaagttatcccaggcctgtgcgtggtggaaaaagccagccttggccctgcagcctccacctcgccgctgggggaccaacaggttgcttacagctttgcaccccggcatcagcacaggggtccctgccccaccctccggcagctcagggagtgttttcctgtgaggcctcccccatcagtggaccagagggagaagcccgatgccccatcccggctttcccgtaacgcacaggacacgtgtgcaattcataggaacggcccagatcgccctcatgagtgccacctggtacaggtaggtggcgctcacgttcctgcccaaatgcagcccatcggggagtcacagtcagtccccccggcccccctcccagtccctgttggctttcggtagctctcgcatgcagttctattaacagccgtctagaagcgatgctttagtggcctaacccagggtcaaatacagctctttctagcaaaatcaggcagctctgccccatcggtaggggcaccgattagtctactaacagccagaggtccatctaggagggtgccgggaggagctgagcccccggaggtgggctcctggtgacgggtgtccaagaagcggtttccttgggagcttctgcctccgtgggcctctcagcccgccccgtgtggccgcccgggtgtggctcagccatgtcccctccccaggtccttcattcacccctcccctccccacagtggaattgttgaagtgtggcgagtctgtgctcgggacaataaagcttgtgacaggtcc

SEQ ID NO: 38 - DNA, 4992 bp, Homo sapiens
  misc_feature: Incyte ID No: 233331.3
  unsure 524-546, 3267-3287, 4712-4749, 4946, 4948-4949, 4953, 4977: a, t, c, g, or other
ctacggagagtcccgtattctcagagtaaaagttgtttctggaattgatctcgccaaaaaggacatctttggagccagtgatccgtatgtgaaactttcattgtacgtagcggatgagaatagagaacttgctttggtccagacaaaaacaattaaaaagacactgaacccaaaatggaatgaagaattttatttcagggtaaacccatctaatcacagactcctatttgaagtatttgacgaaaatagactgacacgagacgacttcctgggccaggtggacgtgccccttagtcaccttccgacagaagatccaaccatggagcgaccctatacatttaaggactttctcctcagaccaagaagtcataagtctcgagttaagggatttttgcgattgaaaatggcctatatgccaaaaaatggaggtcaagatgaagaaaacagtgaccagagggatgacatggagcatggatgggaagttgttgactcaaatgactcggcttctcagcaccaagaggaannnnnnnnnnnnnnnnnnnnnnncgggtgggaagaaaaagtggacaatttaggccgaacttactatgtcaaccacaacaaccggaccactcagtggcacagaccaagcctgatggacgtgtcctcggagtcggacaataacatcagacagatcaaccaggaggcagcacaccggcgcttccgctcccgcaggcacatcagcgaagacttggagcccgagccctcggagggcggggatgtccccgagccttgggagaccatttcagaggaagtgaatatcgctggagactctctcggtctggctctgcccccaccaccggcctccccaggatctcggaccagccctcaggagctgtcagaggaactaagcagaaggcttcagatcactccagactccaatggggaacagttcagctctttgattcaaagagaaccctcctcaaggttgaggtcatgcagtgtcaccgacgcagttgcagaacagggccatctaccaccgccatcagtggcctatgtacataccacgccgggtctgccttcaggctgggaagaaagaaaagatgctaaggggcgcacatactatgtcaatcataacaatcgaaccacaacttggactcgacctatcatgcagcttgcagaagatggtgcgtccggatcagccacaaacagtaacaaccatctaatcgagcctcagatccgccggcctcgtagcctcagctcgccaacagtaactttatctgccccgctggagggtgccaaggactcacccgtacgtcgggctgtgaaagacaccctttccaacccacagtccccacagccatcaccttacaactcccccaaaccacaacacaaagtcacacagagttttgccacccggctgggaaatgaggatagcgccaaacggccggcccttcttcattgatcataacacaaagactacaacctgggaagatccacgtttgaaatttccagtacatatgcggtcaaagacatctttaaaccccaatgaccttggcccccttcctcctggctgggaagaaagaattcacttggatggccgaacgttttatattgatcataatagcaaaattactcagtgggaagacccaagactgcagaacccagctattactggtccggctgtcccttactccagagaatttaagcagaaatatgactacttcaggaagaaattaaagaaacctgctgatatccccaataggtttgaaatgaaacttcacagaaataacatatttgaagagtcctatcggagaattatgtccgtgaaaagaccagatgtcctaaaagctagactgtggattgagtttgaatcagagaaaggtcttgactatgggggtgtggccagagaatggttcttcttactgtccaaagagatgttcaacccctactacggcctctttgagtactctgccacggacaactacacccttcagatcaaccctaattcaggcctctgtaatgaggatcatttgtcctacttcacttttattggaagagttgctggtctggccgtatttcatgggaagctcttagatggtttcttcattagaccattttacaagatgatgttgggaaagcagataaccctgaatgacatggaatctgtggatagtgaatattacaactctttgaaatggatcctggagaatgaccctactgagctggacctcatgttctgcatagacgaagaaaactttggacagacatatcaagtggatttgaagcccaatgggtcagaaataatggtcacaaatgaaaacaaaagggaatatatcgacttagtcatccagtggagatttgtgaacagggtccagaagcagatgaacgccttcttggagggattcacagaactacttcctattgatttgattaaaatttttgacgaaaatgagctggagttgctcatgtgcggcctcggtgatgtggatgtgaatgactggagacagcattctatttacaagaacggctactgcccaaaccaccccgtcattcagtggttctggaaggctgtgctactcatggacgccgaaaagcgtatccggttactgcagtttgtcacagggacatcgcgagtacctatgaatggatttgccgaactttatggttccaatggtcctcagctgtttacaatagagcaatggggcagtcctgagaaactgcccagagctcacacatgctttaatcgccttgacttacctccatatgaaacctttgaagatttacgagagaaacttctcatggccgtggaaaatgctcaaggatttgaaggggtggattaagcaccctgtgcctcgggggtggttgttcttcaagcaagttctgcttgcacttttgcatttgcctaacagacttttgcagaggcgatggcagagagcagctgcaggcatggtccctggagccgagccttcaccacgcactcgtccaagttcggatgcgggaacctggtcccagcttgagttcctgcctttcccaccacaaattatcaactggttgatgtgtacactaattacatttcaggaggacttaatgctatttatgttgtgcctctgcaggcaaagcccttaataaatattttacatcctttctaatgacaatgaatggaattaatcactcaacaggtatagtattacgactcatgtttactttttaaaatgatttagaccgattttcagattttatttcgttatgattaaagatgtctcatgtacttggaaaagtgagcannnnnnnnnnnnnnnnnnnnncactttcataccaggcttaatgtcaatgacatttttatttttgaagtactctgacacctccaccctctactttattagaattggaaggcaaatttttgtccaaaaacctacagacaagtactttgagagaatttccaatataatattagacataatgataattttttccatactcagaatgaaaaactggatattacgtttttgttttggggtttttttgtacaaatttagctaatagctacaggctgagagaattgtaacatagcatgacaaattttgtgttgacttgaaaggaatcacaccattattccttagaagtaattacatgtgttctaacacatttgagacagggttggactcccatttctcatccgagaaattacttaacccttcctggcgctgtacagtcatcttttattctatttcctctttgctgtttgtagtagagacattttgaatgaaacttggcactgcttgattcaaaactgtggaaaccagatctgtttagtctcctgtttgtatgcgtttgctaatggtagctaaataaccagtttttgttgtaaatgcaccaattctgaaggcactttatgtactacatggaggtcatatctggttttgtttttatttttttatcatgaacattaaatgtgatgatgatttcttttccctgcacacatctttccggtgcaatatctatcaattgtgaatctggctgctggtgtataaaaacctggatgtaaagctgagcctacagacctgtcctcaccaactgttttgtgatttctactcaactacaaagatttatttaatgtactcttaatctaactgagttttgttaccaatgacctgttgcatgcttcaataccgtgtactgcctgagttgtgcctcttgtgtgctagattaaaagtgagacagagacttgacttgatcctctgagctcaagctattgagctggtagtggcagaggactgagggtacctgcacagtttgattcttttccacgtgtaagtctccattgcagaattgtcgtgctttgagaaaacacctgaggcagtgtgggagttgaacgaccctgctgtcctttttaacctgtgttgtcctagaccctgtcggggcagtcaggggacactagagatttgatctcatgcgagtcatcaataggacaaaaaagttgtggtttggggaggtctgtttgttacataaaaaggacctttcggtgtaagaaattgccgtttttaccctgccctggctggcatgtgagaagccatggaaggttgtggttgtaaatgagttgtctaaaggggtgcagaggcctgaggtttctaaaagaaggtagatttctacagagctgagtgttggttcctttttcttattggttgaaaattacctggtagtgatcagaaaacttagatgctatgtaactnnnnnnnnnnnnnnnnnnnnnnnnnnnnnnnnnnnnnnttcccgctcatgagttttgactattggtgagatgttttccgctacagttaacatgacaaatgtctcagtggcaaaaatcccctttttgtaagcccccatagtctagaggcagttttctttttaagaatcatgccagagcctgagtcgagcagtatgctttcttggtttttgagagtaattgtgtaattgtagagggngnnatcnaattctaacctaagaactgggatncttctgtcatcttgt

SEQ ID NO: 39 - DNA, 2398 bp, Homo sapiens
  misc_feature: Incyte ID No: 474682.2
gccgcctctgctggggtctaggctgtttctctcgcgccaccactggccgccggccgcagctccaggtgtcctagccgcccagcctcgacgccgtcccgggacccctgtgctctgcgcgaagccctggccccgggggccggggcatgggccaggggcgcggggtgaagcggcttcccgcggggccgtgactgggcgggcttcagccatgaagaccctcatagccgcctactccggggtcctgcgcggcgagcgtcaggccgaggctgaccggagccagcgctctcacggaggacctgcgctgtcgcgcgaggggtctgggagatggggcactggatccagcatcctctccgccctccaggacctcttctctgtcacctggctcaataggtccaaggtggaaaagcagctacaggtcatctcagtgctccagtgggtcctgtccttccttgtactgggagtggcctgcagtgccatcctcatgtacatattctgcactgattgctggctcatcgctgtgctctacttcacttggctggtgtttgactggaacacacccaagaaaggtggcaggaggtcacagtgggtccgaaactgggctgtgtggcgctactttcgagactactttcccatccagctggtgaagacacacaacctgctgaccaccaggaactatatctttggataccacccccatggtatcatgggcctgggtgccttctgcaacttcagcacagaggccacagaagtgagcaagaagttcccaggcatacggccttacctggctacactggcaggcaacttccgaatgcctgtgttgagggagtacctgatgtctggaggtatctgccctgtcagccgggacaccatagactatttgctttcaaagaatgggagtggcaatgctatcatcatcgtggtcgggggtgcggctgagtctctgagctccatgcctggcaagaatgcagtcaccctgcggaaccgcaagggctttgtgaaactggccctgcgtcatggagctgacctggttcccatctactcctttggagagaatgaagtgtacaagcaggtgatcttcgaggagggctcctggggccgatgggtccagaagaagttccagaaatacattggtttcgccccatgcatcttccatggtcgaggcctcttctcctccgacacctgggggctggtgccctactccaagcccatcaccactgttgtgggagagcccatcaccatccccaagctggagcacccaacccagcaagacatcgacctgtaccacaccatgtacatggaggccctggtgaagctcttcgacaagcacaagaccaagttcggcctcccggagactgaggtcctggaggtgaactgagccagccttcggggccaattccctggaggaaccagctgcaaatcacttttttgctctgtaaatttggaagtgtcatgggtgtctgtgggttatttaaaagaaattataacaattttgctaaaccattacaatgttaggtcttttttaagaaggaaaaagtcagtatttcaagttctttcacttccagcttgccctgttctaggtggtggctaaatctgggcctaatctgggtggctcagctaacctctcttcttcccttcctgaagtgacaaaggaaactcagtcttcttggggaagaaggattgccattagtgacttggaccagttagatgattcactttttgcccctagggatgagaggcgaaagccacttctcatacaagcccctttattgccactaccccacgctcgtctagtcctgaaactgcaggaccagtttctctgccaaggggaggagttggagagcacagttgccccgttgtgtgagggcagtagtaggcatctggaatgctccagtttgatctcccttctgccacccctacctcacccctagtcactcatatcggagcctggactggcctccaggatgaggatgggggtggcaatgacaccctgcaggggaaaggactgccccccatgcaccattgcagggaggatgccgccaccatgagctaggtggagtaactggtttttcttgggtggctgatgacatggatgcagcacagactcagccttggcctggagcacatgcttactggtggcctcagtttaccttccccagatcctagattctggatgtgaggaagagatccctcttcagaaggggcctggccttctgagcagcagattagttccaaagcaggtggcccccgaacccaagcctcacttttctgtgccttcctgagggggttgggccggggaggaaacccaaccctctcctgtgtgttctgttatctcttgatgagatcattgcaccatgtcagacttttgtatatgccttgaaaataaatgaaagtgagaatcctc

SEQ ID NO: 40 - DNA, 616 bp, Homo sapiens
  misc_feature: Incyte ID No: 003161.7
  unsure 610: a, t, c, g, or other
ctggtggagaatgctttgcgagtggctaccatcaacacagtaggagattttatgttattccttggcaaggtgctgatagtctgcagcacaggtttagctgggattatgctgctcaactaccagcaggactacacagtatgggtgctgcctctgatcatcgtctgcctctttgctttcctagtcgctcattgcttcctgtctatttatgaaatggtagtggatgtattattcttgtgttttgccattgatacaaaatacaatgatgggagccctggcagagaattctatatggataaagtgctgatggagtttgtggaaaacagtaggaaagcaatgaaagaagctggtaagggaggcgtcgctgattccagagagctaaagccgatgctgaagaaaaggtgactggtctcatgagccctgaagaatgaactcagaggaggttgtttacatgaggttctcccactcaccagctgttgagagtctgcgattatgaagagcaggatcttattacttcaatgaaagcatgtaacaagtttctcaaaccaccaacagccaagtggatttggtacagtgcggctgtctaataaataatcaaaagcatttgataganaaaaaa

SEQ ID NO: 41 - DNA, 1798 bp, Homo sapiens
  misc_feature: Incyte ID No: 984248.1
gctgaaacaggttaagaatattcttaatctcattatagataattgcccccatgggacttgaaatacaacaccttgtgctgaaaacttcaggttggcaatatttgaaggtttcgttgtagaagagtttaacattaactcctattttgacttacaaatcttgtttctcatcactaaaatgcttttgaattaataatccaacccacatgagctgagagtttttcttttgttagaaaagaaacagacatctttctgtatgaaagtataaattgtatggttttagatacataagaattgacaaaagcgagcgaaatctttgtacttctgagttcttgctgtatgtatgttttgttttaaatctgattagggacacccagcagctggccgggattcttggattgctccttgggagttaagattgtcaatactcctgtgaagcaagggatttcagccatagaacaaagatttattgttgccacctgaaaagtttacaagtatttattgtgtatttgatacattgcttgaaaagatgaaatctgttaaagattcttttcgatgtccaggttaagaagaaacctccttgtattgagtgaaattatatgttaaatgtattagagaatgtaggtggtatagaaattgatttttcttggtgtagaacaactcagttcggcaaagtttaaaatttgattaaacaagagaagtggttcaggttgaagatggacttgttaggaagtgatcaagtcctttaagtacttgtttctttttcaggttgtgatgtggccattccgaattttgttgagagtttggtttataattgtctcttttgtcttgttagtaaacattcatttgcaacagttttgaaggtgctgagtggaaaaccgaaacacatggttattgcgtattggacctagaatgaaataattgcctcaatatttaacaacaagccattcttatctcaaagatttaaattcccgaatgtcccattcgcaaatcatatgcaattgaagtgagcagcatgagcatctgggtcatgagggccttcatttacgtaaatttgtcactaaaacccagtagtagctctacaaaatcttaaactgctgcagtgctcaaggagatggaatatctttgtcattggtgctgaggagagcatttcggtagaagacagttgcgcctgaagattgagtgtaaatcattcaaaccagtggttctcagtgttggctgtatacactttgtagtcactttggaatgttggaagacacatcgatgcttgggttccgtatgccaagattctgatgttggtctggaatatgagctggtcataaggatttttaaaaactttctggtcatttcaatatgctgccaaggttgagaaccactgttgtaaaattcaccttgagttttctcatctgcaaaatagaaaaaaaaaaatccttgctccctcccttcactacctcacaaggatattgagggtaaaggagaaaataatgggaaagtgcttgtgccgtggatgaaaagtgctattaaaagtcaaaggagtgttctgtttcaattcatagtatgatcagggaaagtgtaactgagtatactttgttgacttgggaaacctggagcactttctttggttggttaacgaagcatgcagatgtggaagcagacgttactattatccctactatggtcttctgtcatactgagacaggctgttttaattacctggttttacataggaaagaagaaatattaaggcttaaagtttgtaatgatcaatggctcataattcattaaatcttttcatacaagg

SEQ ID NO: 42 - DNA, 1183 bp, Homo sapiens
  misc_feature: Incyte ID No: 196590.2
  unsure 550: a, t, c, g, or other
ggttgggattacaggcatgagcaccatgcccggccccttattttactttatcctcctgattatttgaatttgttacactaagcatgtattttataatcaaaaataattaagatttaaaacaatgtatttgactactaaaaagcaaattatataaatcagttgaataataatgttgttaaagaggctgtttagcactaatttgaccaaatctatagtcaaagtttgattctacttgaattttttggaaatttgctgttgtattacttattctttgccttgttctctgtgaagtcctttcctaaaaaagaaacttatacaatttagttcacaaaactttgttgacctctttctctgtagaaatgaaaactaaatatatataattgagaaataattctgatactcttcattcctataaaagtaattaagatagacctataggattgttgaactttgctgccaaatatagtaaccagtaaccacagctagctgtaaaaattgaaaattcagttcagtcaaaacttagcctttattttcaagtgcctcaaacagncccactggtggctattggttaccttactgaccagccaatataggctatttccgtcattatagaaagctctattggacaacattggtctaggacatatattttgtattttcccctcacccaccatccaataatgagtaatagcacaaagtaaaagtgacttaatttgaaattacttctgtttggctagtttgcttagctgatcaccaccaacatcataggtctataaatcacccaactaagatcaggggtgtttcatgggaaaatctacacaaactattcattaaaaaccatagagccatggactgtcatttctgatttctgtttgattctttgtggtcatcattgaatatacaggggcctctatacactctggggagtatctattctcaggtgagcaaaataccgaatactgaatggaaatcaactgtaagtattaggacttcatatgcaacttgaatttttggtgctgtccggagtctagagccccacaatctgttttggttacagtttatccctgtaggataaatgatccatttaactattcatcagaggtgctgtaattttaaattgtctcttgtctccttcagttaattttcagaattaaaaacataccatgggaaaaaaaaaaaaaaa

SEQ ID NO: 43 - DNA, 1195 bp, Homo sapiens
  misc_feature: Incyte ID No: 255109.1
  unsure 97: a, t, c, g, or other
atcaaaacttcatgctgtacaacataaatatactatacaatttttacttgtcaattaaaaaagtaatcctaacatttaaaaaggcaatgcataaaanctgagaacagactataacaactgaaacaaactgggcaaacatgagatgagaaaccagccagcaagtcaatcagaactctttcttcatctcgtctacaatattttgtatttataactgtaaattagtgtatagtgtttcactccagagacttcaataatacagtgttatcaaaggacttgtacagatttcagagaaagacacatttagaagatggagagttctccgttatgttctatctgagagtcagtatgaaatgtcagatctaaaagtacataattcagaggtctatttcaaattaataatcatttgagcataatttctccactgtcagagacgactgttattttattttcaatcaaattaaaagttgtttttatgcatatcttatttttagttatatgttacttgtacatacgtagcagtacaagtgcatataaatcctgtaagagtataaatcctatagaaatatattaagctgataattatgtctgttctgtttgatcacagagttgcaacaaataggcctcatttcctaagttgaggaaatgattttctcattttatatgagacttgtggtgtggaatttcaaggtagaaccaaaatgtgtggaatgaatatttcaatgaagatgcgttctgctgctaatagcaggaaatcccatctagtggctttatttttctttaacccgttatctcacatagccgatagatccaaggctgggcatctccagagttgctcaactcagcaggccagtggcatcaccagcgaccctggaacttcatagctcatctctctatcacacacagtatgtcagctttcctgagatggtagggtgacccctgcagcagctttaggtttgttattctttcacaacaactcccaaaggcaggaaaaggatactcctttctcctgtgtgcctttataaggagcaactaaactgtttccagagtgttcccagtacccactttctcacacattggaatgaccgtgggatcacatgggctcagacaagccaggattcaacctttgcagagtgggcgtgaggcacatgggaagaaaaggagcaaaatcatgtattttaaaaaataaagaaatggt

SEQ ID NO: 44 - DNA, 947 bp, Homo sapiens
  misc_feature: Incyte ID No: 238622.1
caggcccagaagcctagtgggtaagaatggttttgggggccaagcctggggccctgctgctctctgtagcctttggacactgctacctgcatctggctgatccagctccacccatggctcaaagtgccccagatacagttcaggccactgccttggaggacacaagctataagacttggtggcttccccatggtgttatgtctgcaggagaacagaatgcaagagtgaaaaaggcttgacagcttccacctaggtttcagagggtgtatgtgttgaaaagcctgagtgcccagggaaaagcctgccacaagggtcgagctcctacagagagactctactagaacagtgctcatggaaaatgtggggttggagcccctgcacagagtcatcatggtactgctgagtgggattgtgggaaggtggctgagaatggtagagccaccagcggcttgtactctgaacctggaaaagcaaccggcactcaactccaaccagtgagagtagccatgggagctgcacctgcagagccacagggatgggtatgcaccaaggccttggcatcccaccccttccatcactgtgccctggatgcagaatatggagacaaaggagattattttggagctctaagatttaatgacagccctgctgggtgtcagacttgtgtggtgcctgttgcccctttcttttggctgatttatctcttttggaattggaatatttacccaatgcctggatcaccattgtatcttggaagtaaataacttgtttttttatcttacaggctcatagttggaagaaacgtgccttgagtctcagattttggaattttgagttgatgctgaaatgagttgagacttttggggaactattgggaagggatgcttgtattctgcagtgcaaaaaggatgtgagatttgttggggggtcatgggcagaatgaaaca

SEQ ID NO: 45 - DNA, 6549 bp, Homo sapiens
  misc_feature: Incyte ID No: 334385.3
  unsure 62, 2192: a, t, c, g, or other
atcttgccgaatcctgctctggagacagggtgggcacagctctgtgttcagaggcctggggnccactgctggtgttgtgctgggacaggggatggagcaggggtgcctctgcctcttgggtgtcacctcctcccctggagcacctgagggctggctgtgtgtctctccagtcccgcagcgtggacaagcagcatgccgtcatcaactacgaccaggacagggacgagcactgggtgaaggacctgggcagcctcaatgggacgtttgtgaatgacatgcgcaccccggaccagaagtacgtcacgctgaagctcaacgatgtcatccgcttcggctacgattccaacatgtatgtgctggagcgtgtgcagcaccgagtcccggaggaggcactcaagcatgaaaagtacaccagccagctgcaggtgagcgtgaagggtttggcgcccaagaggagcgaggcactgccggaacacacaccatactgcgaggcctcgaaccccaggccggagaagggggaccggagaccaggaacagaggcagcctcttaccgcacacccctgtatgggcagccctcctggtggggtgaggacgatggtagcacgctgcctgacgcccagcgccagggagagccctacccagagcgccccaagggacccgtgcagcaggacggggagctccacggcttccgcgcccctgctgagcctcagggctgctcgttccggcgggagcccagctacttcgagatccccacgaaggagaccccgcagccgtcgcagccccccgaggtgccggcacacgagatgcccacgaaggatgcagaggcaggtgggggcggagcggcccctgtggtgcagagccacgcctccttcaccatcgagtttgatgactgcagccctggcaagatgaagatcaaggaccatatcaccaagttttccctgcgccagcggcggcccccgggcaaggaggccacacctggcgagatggtgtcggctgagaccaaggtggccgactggctggtgcagaatgacccgagcctgctgcaccgggttggccctggggatgaccgccacagcaccaagagcgacctgcctgtccacacccgcaccctgaagggccacaagcacgaggacggcacgcagagtgactcagaggaccccctggccaaggcggcctcggccgctggggtgcccttggaggccagcggggagcaggtgcggctgcagaggcagatcaagcgggacccccaggagctactacataaccagcaggcctttgtcatcgagttcttcgacgaggacacaccccgaaagaagcgctcccagtccttcacgcacagcccgtccggggaccccaaggccgacaagcgccgtggcccaacgccggccgatagggaccgccccagtgtcccagccccagtccaggcagggggccgcagctcggggccacagagggccggctcgctcaagcgggagaagacagaggaacggctgggcagcccctcgcccgcctcccgaacccctgcccgccccttcggaagcgtggggcgccgctcccgcctggcccaggacttcatggcccagtgtctgcgggagagctccccggccgcccggcccagccccgagaaggttcctccggtgctgcccgctccctgacaccccatgggaccagccccgtgggccccccgaccccaccgcccgcccccacggacccccagctgaccaaggcacggaaacaggaggaggatgacagcctcagtgacgcaggacatacaccatcgagacgaggcgcaggacacggaggtggaggaggctcggaagatgatcgaccaggtctttggggtgttggagtcccctgaactctccagggcatcttcggccacctttcgcccagtcatcagaggggacagagatgagtctgatgacgggggcgtggcccagcggatggcgctactgcaggagtttgcctcccggccactgggtgcggccccccaggcggagcaccagggcctcccggtgccgggctcccctgggggtcagaagtgggtgtcccgctgggccagcctggctgacagctactcagacccgggcctcacagaggatggcctgggacgtagaggcggggagccggaggggtccctgcctgtgcgcatgcggcgacggctccctcagctgcccagtgagagggctgancagccctgcgggcccagagagcagcaggaggagtgggcctgggccaccggagctggacagtgagcagcccagccgcctcttcggccaggaggagttggatcctgacagcctcagcgatgccagtgggtcggacgggggccgaggccccgagccaggggtggagccacaggacagcagacgcaggagcccccaggaggggcccacgtggagcaggggtcggcgctcaccaagggcccccggggagccaactcccgcctctttcttcattggggaccagaatggggacgctgtgttatctaggaaactgcttgcggctccaggggatggggagggcctagggcagacagcccagcccagccccccagcacgggatggcgtctatgtcagtgccaatgggagaatggtcatccagctacggcctggacggtccccagaacccgacggccctgccccagcctttctccggcaagagagcttcactaaggagccagccagtggtccccccagcgcccggcaagcccccccacatctccagccacccgcttctacaggacctggccgctacccgggccgcacgcatggacttccactcccaggacacccacctgatcttgaaggagacggagacggccctggcggccctggaggcccgactcctctctaattctgtggatgccgagtgtgaggggggcagcaccccgaggccgccggaggacgccctgtctggggactcggacgtggacacagccagcaccgtcagcctgcgtagtggcaagagcgggcccagccccacaaccccccagcctctgcgggcacagaaggagatgtcgccatccccgccagctgcacaggacccgggaggcaccgccctggtcagtgcccgtgagcagtcctcagagaggcagcatcacccacttggcccgacggacatgggccgtggagagccggtacggcgctcagccataaggcgtggccacaggccccgagggtccctggattggcccagtgaggagcgtggccctgtcctcgcccacctacccagctcagatgtgatggcctccaaccacgaaacccctgaggccaccggggcaggacggctaggttctcgccggaaaccagcggccccaccgccatccccagctgcccgggaggagcagagccgtagctcagccagctcccagaaggggccgcaggccttgacccgctccaacagcctgtccacccctcgccccacacgggcctcccggctgaggcgggcccggctgggggacgcttcagacactgaggctgcggatggtgagcgggggtccctgggcaaccctgagcccgtgggccggccagctgctgagcaggccaagaagctgtcacgcctggacatcctggccatgccccggaagcgggccggctccttcacagggactagtgaccccgaggcagcccctgcccgcaccagcttctctggccgcagtgtggagttgtgctgtgccagccgcaagcccaccatggccgaagcacgggctgtctccaggaaggctgccaacacagccaccaccacgggtccccgccagcccttcagcagggcccgctcgggcagtgcccgatacacctccaccactcagaccccgagggctggcagctccagccgggctcgttcccgggcccccggcccccgggacacggacgacgatgaggaggagcctgacccttatggtttcatcgtgcagacggcagagattgcggagattgccaggctgagccagacgctggtgaaggacgtggccatcctagcccaggagatccacgatgtggctggggacggtgacacactgggctcctcggagcctgcccacagcgcctccctcagcaacatgcccagcacccccgcctcgaccatctctgcccgggaggagctggtgcagcgcatccccgaggccagcctcaacttccagaaggtgccgcccggctcgctgaactctcgggactttgaccagaacatgaacgacagctgtgaggacgccctggccaacaagacgcggcctcggaaccgagaggaggtgatcttcgataacctgatgctgaacccggtgtcccagctgtcgcaggccatccgtgagaacacagagcaccttgccgagaagatgaagatcctctttcagaacacagggagagcttgggaggacctggaagccaggatcaacgccgagaacgaggtgcccatcctgaagacatctaacaaggaaatcagctccatcctgaaggaactgaggcgggtgcagaaacagctggaagttatcaatgccatcgtggaccccagtgggagcctggacctgctcacaggaaacaggagcttggccagctctgcacagccggggctggggaagggccgcgtggctgcccagagcccaccctcacccgcctcagccgaggccctgctgccagccctgcccctgaggaatttcccacagcgggccagctgtgggcctcccagcctcccggaccccaccttcctccctgatgccgagaggttcctgatctaggccccagacctggccaggccagcctccctgtgcgtgtgcgtctctgccttccgtccgccgcacacccgcctgcctggccgcaggtggttctccctgaagacccccacatgtgccatatccctgtgggcgggtgcctcccacgcccttgccccctcgtcagctcccagccagcaccctactcaccctgtccagccccatggccacccccacccctgcctcgccccctacaggcctctgggcccagctcctggccaggctgctgccaaggtcaagccctcaagggcattaccccgcctcctcttcatcactgttatttttgtctttagctttaaaggaaagagttgttggtgccattgcaggtgccccctccaggcctgactggctccgccaggcactaacctgccataaccctttgtgctggcctgcggccagggcagaggaagagaggtcgactgtggggtcatttggtgccaaacatggaggtgggcaggctcacctgttcctgggactgtctgagatggcagggcacttgccctggtggctcccacctgaccccaggccttttataggcaggagccccactgcttccagcctctggtgccaacacagttgccaaacccattgagcttggggctgccctgtggaggcctcctgggtatggaccaggggcttgttgagagctgagccatgcacacaggtgcagacaccccccaactcccatgcacacggctagtccaggcgcctccacgctgcaccgtgaggactgcagggcatgtccccgtgaggggctatgggcctctgtaggtgggcttccaaggtcctgggtgcagccgggtgcatggcagcccttctggcgggggtgagcgcacgaccaaagtcactggaagccgggtttccggaagctcgcagcttggcctgcaccacacgccctccccttttggcttcacgccatcaggcctcaagtgggcatgggggcagggacgggcccaggaactgttgttttctcaggattctttcagctgggaacatggcaggtgagcagagcttggtgcctctgccgtggcccctgctggggcagcccgtgttgccggagcctctaagccaaagagcccgttggccgtggttggtgggggtggacgtgggggtgtcccacctggaccagactggcgtgggtgagctccacaccctgcctggcaatggtatgagagtcggacctggacagggccagctgctgggggagcggcactggggactggaggctggaagcgggtggtgtgtgtcccctgtttacttttagctgagctggggttgggtgtacgggttctgttcctctgagccctgcggcccacctgatgtttacgtgtgtgtgtgagggggggcgggggtggcaggtgtccccccctggtccccgccccaagagcctgctgtctgtatggaggaggtgctagcccggtccaccgggctgctgcccacccctgcatgccccagttgcccaccccgcctgcccctggacatgaagtggtcacgcttcatccacggctccttcccacccctcggcagtggctgtgcaatgttttaagttcacaagttcctgctcctccccacactgagctcctttgttcctccccctccagcctttgcctgggaactggtccttgtttgccgggcttctcggagggttcactgtacattcgttctcaggtggtcttgtggctgtctttcggaaaatggttattttatatgatttgtcatggaatttgttctaataaatcattcttctatcacatggcagcacgctggagcctgtcaaaaaaaaaaaa

SEQ ID NO: 46 - DNA, 4365 bp, Homo sapiens
  misc_feature: Incyte ID No: 998997.1
ggaggaggagaggtcggagccgtctccaggagcccttagagaccgagtcccggcggcgacggcggggcagcgcaccggcaggcggattcattccacttaaaacctgaaaacattggaccacacaaagtcttactgatttcaggtaaaaacaataattgaagatgtccagcaaaacagcaagcaccaacaatatagcccaggcaaggagaactgtgcagcagttaagattagaagcctccattgaaagaataaaggtttcgaaggcatcagcggacctcatgtcctactgtgaggaacatgccaggagtgaccctttgctgataggaataccaacttcagaaaaccctttcaaggataaaaaaacttgcatcatcttatagtggaatagagaaacagctcctcgcctcttcccaacaacgcaaattatgagcagctccttgaagagatttaccttcagcttatttggtaaccactgctaataactaaaatgttctcagcttggaataatggactctgaagtctctattttccaagttgtcctttctcttaaaataccctttactgatttaatacagaataacaatcttattttccacttggtaactatggctttatgttgggttactgtttaaggaaagttgatctgggcctttttaaaaacataattatatactttagaaatacaagggattccgatatgtcaggacctaaatggcctaagcacctgtcaaattaaaattccaaaattcattgaaatcctaaagccttgatattatattctttataaggcgtgtgccagcctgtatagtatataagagagaggggtgtttgtgtgtatatatatatgcctttgtgtatacacttatcaaagctattttcttatgaaaacgtccctctctccataccatcagtttctcagttccagaagttatacctttattttgagctgtgtataggtagaataaaaaattcctttcatatcgttattgtacaaaaagtaaagagtatcctaaagattgtattcattgtaatcaagtaatgcaatcatctctcctctcttgaaatcttgctggacctcttaggctacaataaactgtaccaaactaaactgacagtccttcgataatatgaaacattaatttacaaggacccgttagggcttcaatgatgctgagtctggaaaaggggaggagacccttgggaggactccaggcagctgtgctcccagggctcatgttctctactggattagggataggcacctctgaaatctccaccctgatgattggaatgaaacggagtgaacatgagcccagctgagagaggagcaggaatgtgtgaaaaacagctgctctccttgtcccagctttgtgattgagccctctgtcttgctctctctgccttccctgtgtctttcttctcttaccagagcatctgtttgcagaggtaacattaccttccccagccacaggtatgtggaatacggtgaggaaaaaaaaaattaaaaaaaaaatgcaagctgtcaggatgcttaagctcttttcagacatctgcagtttcatccctaccttgttcacataccatccaagaggcacataggctacccaagagagccttggattcagtggtacactccttgggcccaagggctttagcagctggatatggggttccttgattttcctctgggcccaaatatagccctcacactcttggaatttccaggtatgggggtagccccaaaaggaggaatctcctatggccaataaggtatcttgactttatcaaagtagaagagagggtcacttcggagtcaaatcatacactaggcctttgatgctttaattcttcttcagttcattaaaagtaactactaaggaaaggttaaaaacttcccctcaaaaaggaatcaaccccaggaagtaattatttacaacgattttcccaaattttgtacaatctgtcctggaaagcaaaccccttttaaaatctaatgtctgggctttgagtattagctcatttagggtggacaaatgcattactgttttcaaactgctcacatttattcagtatttctccaagttgctatctactcagccttatgaatgcccctcgcttttctaaggccatgtgaaaatcacggcactgcccttagccttgtgtcatctgctttttcgttctgcgatatgcccagttcccaaatcaattataggtacctgtttaggagagaggaagattttacctctcaaagggtgagatttgaaatttacactaaaaagacaactttacatttaatgcttcacttaatgagacattcttttttttataagtctatttttctactcagtttcagaacactaatctgattttcactctgatttttaacgtttctttaaatatttataatgtagcttctttcaaaatattttcatgaaaaattacttttattataccattatgtgcatgttattggtagcaggcatagtttattatttagtactgaaacatgctcttttacctaacagtaaacaagtatgttttgatatatatctgttaatatgcttatagtggtaagaaatggacttgaggtcccaggagatttcattttattcaccctggtcagatacaataaaggctatgagtataaatacataacttcctaaccaggtgtagggcatgttcatgaatatcaaatcttttgatgctggacccaagagaggaaaagttgtagctaaatgttgatttacttataactagacgtctatgtgagaaaatatatgtatacatatatatgatatgcagaagtcactttttttatcaggctttattctccttacaaagccacagtttaactgtctgcaacagttggtttatgttaatgatagacaaatacccagtgtttgttactttttccaactaccactgtaatgataatctttctcacgtatatacatgcaacttcttggcttcatttccatgaagctgtttcaatatattcagtatactttgtccttaatgctgcttctgttaacagtgatctctttctttttttcattcttatatcttcattagttcatcataaatctgtccagttgaggcctcaggaccacggcatgatttcatgactccgaagtattttacagaaacattttttaaataagggaaatattttatataccagatggttcacaagtgatggctcatagctagtttttttttttcttctaaaaaatgtcaggtttttaaaatcatttaccttattaaaatgaaaagtgccatacttaacttttaaaggaaagacctgacttgctttttctctatttagactgtttttgtactttactaatctttaaactatcaggaaaaaaaccaaaactttataccaatgatttagtaattttgaggcatagggtagcttacgtagtggaggatgtgccaaatattctcttcaaatgccaccttctcaatttataactaaaatagtgttatctgactaattcctctgaattttgatgtaagatctatataggcccccaaaatgatcgtagtacatgccagtcatttctcagtgaaataaacacaataccagagtacattatgggttttattgctttcttttatggtagacctgttaatggggaaaaaatacatcaaatcaaatagaatcttatatctgtatgttaaaatagagcacttacctgaagtcagtggcctggatcatagccctggatcatttcccagtctgtcctgtgctgtgtgaccttggacaaggcgcttcatctctctgggcctctatttctccatttgtaaaacaagtggctgcagtagatgatggctgagagcccttcctgttcccagatgccttggtccaaagaccccacccctctgctggtcctgccaacgtgttggtgctataagctgcttcagatataaaattggtttatctataatgtttgttcatttaatagcttctaaaaggcctttttgttatacagtgctttttttctagttttatggacttgattactgtaataatgtcttgtttttagccatgtaactacaaacagatattctcttgatgtcttagtaaatttgcatttgatatatcattgatgagattttgttgttatgtaatattctttggctacgcatctgtccagcatcttattaaccataatactgtgatcattatttggaaatatgtcctatggaaagaataaaagcatgtacttcacagctagcatgttcacagatttgaaagaagtttcattaaaagcaccattgctttctgtactgcgtcagtgcctcattgtatcatcctacttgtgttttgctcaataaatgaataaaagaccatttctcttc

SEQ ID NO: 47 - DNA, 2321 bp, Homo sapiens
  misc_feature: Incyte ID No: 200578.1
  unsure 171: a, t, c, g, or other
gagcaggtatctcttttgcagtggtgactgtattttgagtaccttgtgtgacagggtattattacagcatcttgtgggaaaacctattaggcctttgcatgttaaagctgtataatttgttgggttgtgagtggtctgacttaaatgtgtattataaaatttagacatcanattttcctactaactaactttattagatgcatacttggaagcacagtcatatcacactgggaggcaatgcaatgtggttacctggtcctaggtttgaactgtcttatttcaaaagatttctgaattaatttttccctagaatttctccttcattccaaagtacaaacatactttgaagaatgaaacagattgttcccatgaatgtatgctcatactcgactagaaacgatctatgttaaatgactgtgtatatgaattatttcaagtactaccccaaataactttcttattgctctgaaagaagaaaagcaatgtaaatcactatgattattgcacaaacaaccagaattctccaacaattttaagtaatctgatcctcttcttggagaaaattgttacctaatagtttttccttatgaatgttattactactggtataaatcaaatttctataaatttcctacttaagtcttaagaactgggttcttcctttgatgttattcatgttcagaaaggaaacaacactttactcttttaggacaattcctagaatctatagtagtatcaggatatattttgctttaaaatatattttggttattttgaatacagacattggctccaaattttcatctttgcacaatagtatgacttttcactagaacttctcaacatttgggaactttgcaaatatgagcatcatatgtgttaaggctgtatcatttaatgctatgagatacattgttttctccctatgccaaacaggtgaacaaacgtagttgttttttactgatactaaatgttggctacctgtgattttatagtatgcacatgtcagaaaaaggcaagacaaatggcctcttgtactgaatacttcggcaaacttattgggtcttcattttctgacagacaggatttgactcaatatttgtagagcttgcgtagaatggattacatggtagtgatgcactggtagaaatggtttttagttattgactcagaattcatctcaggatgaatcttttatgtctttttattgtaagcatatctgaatttactttataaagatggttttagaaagctttgtctaaaaatttggcctaggaatggtaacttcattttcagttgccaaggggtagaaaaataatatgtgtgttgttatgtttatgttaacatattattaggtactatctatgaatgtatttaaatatttttcatattctgtgacaagcatttataatttgcaacaagtggagtccatttagcccagtgggaaagtcttggaactcaggttacccttgaaggatatgctggcagccatctctttgatctgtgcttaaactgtaatttatagaccagctaaatccctaacttggatctggaatgcattagttatgaccttgtaccattcccagaatttcaggggcatcgtgggtttggtctagtgattgaaaacacaagaacagagagatccagctgaaaaagagtgatcctcaatatcctaactaactggtcctcaactcaagcagagtttcttcactctggcactgtgatcatgaaacttagtagaggggattgtgtgtattttatacaaatttaatacaatgtcttacattgataaaattcttaaagagcaaaactgcattttatttctgcatccacattccaatcatattagaactaagatatttatctatgaagatataaatggtgcagagagactttcatctgtggattgcgttgtttcttagggttcctagcactgatgcctgcacaagcatgtgatatgtgaaataaaatggattcttctatagctaaatgagttccctctggggagagttctggtactgcaatcacaatgccagatggtgtttatgggctatttgtgtaagtaagtggtaagatgctatgaagtaagtgtgtttgttttcatcttatggaaactcttgatgcatgtgcttttgtatggaataaattttggtgcaatatgatgtcattcaactttgcattgaattgaattttggttgtatttatatgtattatacctgtcacgcttctagttgcttcaaccattttataaccatttttgtacatattttacttgaaaatattttaaatggaaatttaaataaacatttgatagtttacat

SEQ ID NO: 48 - DNA, 2753 bp, Homo sapiens
  misc_feature: Incyte ID No: 208134.1
  unsure 716, 1782, 1793, 1797, 1801, 1804-1806, 1808-1809: a, t, c, g, or other
gttcgataaaattttctgcagtgagaaatgacagactgagtgcctgacaatttaagccacatatgaagtatgcaagtaaagattcagtccttaatgtcatctatatcatggtataaaagctcaacaagtatcttataatttggagttaactttataaagtaagaagagtttggatatcttgataaaagattttcatgtttgctgctttttttataataaaaatcccaacattttgccatcttatgtttagctacatgaacttcgcaatttcatcggctcattctaatgaccacctaaaagtcctcaatctttgaatattgctttattagctcctctaactggtattctaacagtttagcagcacttatatttattaatgctttacatttttacccctttttgtgtaaacacaaatacacccatgcatatacacacaaacattattgtccttgtgagggtttgggggaaatgaaaaatagtacctttctcctcttcttttgattccttagttcccaaatagactggtgctagtcatttagtcatctgtaaatttcgaaatgtagtttgattaaatgtgaactgaattctcagcaatgaaaaatgtcaagttgaattcatctaataagtgaaaataatatattttgtaaacagattacatttgaacacctaaataagtatttgtttcataatcattacatgcttgtttatgatttacnaagatttggtagagaaaagtacagtccttaaggcatatatatgccaatgcattaaactactcagcttttgtgccagctcaggtgttcataggaacaggaatgtggaataccagctttttactttaattatacttttatgctgaatttttcttccagttaaacctttaattacactagtatgtaaagtagttactgagaaaaataagtttttgatttcccttctgttgatctgtaacatttttaaatgaagctatttaacacatgacatgctaatgttacttaatggattcctatgtatttcattaaaaaaaagtctcccacctgtgttaagacagctaaatatttcttgatgttggcttgaggaccaagtgagccatcttgccagttaagcaagttttatatcagaggaccaaatggttaagaagagaatttgtacatttcttgagcttccccatgtgaagcttgggttcagtactatcctattactatccatcttcataatgagtgaagcaaactgaaagggaattcataatcttttttcttatctgaacagaaaaactaatgaaaatcaacaataaatctttattttaattttcattcaacagctgaaaaaccatgtctgttgaccacattggaccattgcctagttaaaatccataaaattccctataaaccaatgaaaagaaacttgtctggcaataatttccaacattttaaattctaatttttagttacaaagaaaaaggatagaatgaggcttttcaaggaattcttgctcatcccttcaattatttggcaggtaaaacagtcctagaattcagcttcctttttggttttattactattaaatagatactttcatataaatggaaacacttttcctcaaaacattaattcaaaacatactccttatattaaggattatagcaccatattttttgtatattccctatgtgtaactttttcctgttggtatgtgatatttttcatttaatatgactatctgctggtgttggggccaatagatttgtgaatattctgtggatgtgtctatgtataggtgtanatatatatatntatntttntgnnntnnccccagctaattacctcaaatgtgtgattgtttaatatataccacactatgtttgcacagagcagggcttccattagcagtggatatttttatgtctgactttgaaaatcagtcaacacaatttcattggtgtgaattatttgttgctctttttcatattttaatggagagattcctattataaggcccatgcttcaaacataattatatctttctatatccagccatctggaaatacataggggtaagaagtatttcttgaaatgtccttgtttagtaagttagtaaaaactgggatgactagttgccaagatgtcttgtaactgcatagcagatgacacctggcatggcaagtctcattcacttcagcacaacactctgtacatttcagtctgatattctactttgccatttaaggacaccattaaaatcatagagattttcagtgacattggagtattgtaattattactttcaaaaaattatttttaataggatgattaaaccaatgagaagaaacacacataaatgatattttgcagtttatctgtattaagaaatgcttcttgccaatttctagttttagtttttggattgctacataagactttctttccatttactttatgtgtttttaaaagctgcaggtaatttttaaggtttgatggaattataatggaagccttgtataagttaaatgaaattggtaaaggagagcttactttgtctataatgcattcaggattaaaaattagatttcaaaatgaaatgtctgatttgtaaaatatttaatgttatatcagacttacataaaattttctgtgagaactcaaatgcatttgatttttaatgaatgttctgaatgaaatatgaatttttgtctttcagtctctgtagtttatctcaatatattaataaaaaggtctgttctcactgtaaaaaaa

SEQ ID NO: 49 - DNA, 1927 bp, Homo sapiens
  misc_feature: Incyte ID No: 153659.2
gggcagctccaccctgggagggactgtggcccaggtactgcccgggtgctactttatgggcagcagctcagttgagttagagtctggaagacctcagaagacctcctgtcctatgaggccctccccatggctttagggggattataaaactaatcatcaaagccaagaaggcaagagcaagcatgtaccgctgaaaacacaagataactgcataagtaatgactttcagtgcagattcatagctaacccataaactgctggggcaaaaatcatcttggaaggctctgaacctcagaaaggattcacaagacgatctgccgaccctctgggagaaaatccagcaagatgcaagccttcagaatctgggatgttaaccagaagaccttctatctgaggaacaaccaactagttgctggatacttgcaaggaccaaatgtcaatttagaagaaaagatagatgtggtacccattgagcctcatgctctgttcttgggaatccatggagggaagatgtgcctgtcctgtgtcaagtctggtgatgagaccagactccagctggaggcagttaacatcactgacctgagcgagaacagaaagcaggacaagcgcttcgccttcatccgctcagacagcggccccaccaccagttttgagtctgccgcctgccccggttggttcctctgcacagcgatggaagctgaccagcccgtcagcctcaccaatatgcctgacgaaggcgtcatggtcaccaaattctacttccaggaggacgagtagtactgcccaggcctgcctgttcccattcttgcatggcaaggactgcagggactgccagtccccctgccccagggctcccggctatgggggcactgaggaccagccattgaggggtggaccctcagaaggcgtcacaagaacctggtcacaggactctgcctcctcttcaactgaccagcctccatgctgcctccagaatggtctttctaatgtgtgaatcagagcacagcagcccctgcacaaagcccttccatgtcgcctctgcattcaggatcaaaccccgaccacctgcccaacctgctctcctcttgccactgcctcttcctccctcattccaccttcccatgccctggatccatcaggccacttgatgacccccaaccaagtggctcccacaccctgttttacaaaaaagaaaagaccagtccatgagggaggtttttaagggtttgtggaaaatgaaaattaggatttcatgatttttttttttcagtccccgtgaaggagagcccttcatttggagattatgttctttcggggagaggctgaggacttaaaatattcctgcatttgtgaaatgatggtgaaagtaagtggtagcttttcccttctttttcttctttttttgtgatgtcccaacttgtaaaaattaaaagttatggtactatgttagccccataattttttttttccttttaaaacacttccataatctggactcctctgtccaggcactgctgcccagcctccaagctccatctccactccagattttttacagctgcctgcagtactttacctcctatcagaagtttctcagctcccaaggctctgagcaaatgtggctcctgggggttctttcttcctctgctgaaggaataaattgctccttgacattgtagagcttctggcacttggagacttgtatgaaagatggctgtgcctctgcctgtctcccccaccgggctgggagctctgcagagcaggaaacatgactcgtatatgtctcaggtccctgcagggccaagcacctagcctcgctcttggcaggtactcagcgaatgaatgctgtatatgttgggtgcaaagttccctacttcctgtgacttcagctctgttttacaataaaatcttgaaaatgctaaaaaaa

SEQ ID NO: 50 - DNA, 1833 bp, Homo sapiens
  misc_feature: Incyte ID No: 241930.15
gctgctaagagcgctgggtcctgcttgtgctcagctccagctcactggctggccaccgagacttctggacaggaaactgcaccatcctcttctcccagcaagggggctccagagactgcccacccaggaagtctggtggcctggggatttggacagtgccttggtaatgaccagggctccaggaagagatgtccttgtggctgggggcccctgtgcctgacattcctcctgactctgcggtggagctgtggaagccaggcgcacaggatgcaagcagccaggcccagggaggcagcagctgcatcctcagagaggaagccaggatgccccactctgctgggggtactgcaggggtggggctggaggctgcagagcccacagccctgctcaccagggcagagcccccttcagaacccacagagatccgtccacaaaagcggaaaaaggggccagcccccaaaatgctggggaacgagctatgcagcgtgtgtggggacaaggcctcgggcttccactacaatgttctgagctgcgagggctgcaagggattcttccgccgcagcgtcatcaagggagcgcactacatctgccacagtggcggccactgccccatggacacctacatgcgtcgcaagtgccaggagtgtcggcttcgcaaatgccgtcaggctggcatgcgggaggagtgtgtcctgtcagaagaacagatccgcctgaagaaactgaagcggcaagaggaggaacaggctcatgccacatccttgccccccagggcttcctcacccccccaaatcctgccccagctcagcccggaacaactgggcatgatcgagaagctcgtcgctgcccagcaacagtgtaaccggcgctccttttctgaccggcttcgagtcacgccttggcccatggcaccagatccccatagccgggaggcccgtcagcagcgctttgcccacttcactgagctggccatcgtctctgtgcaggagatagttgactttgctaaacagctacccggcttcctgcagctcagccgggaggaccagattgccctgctgaagacctctgcgatcgaggtgatgcttctggagacatctcggaggtacaaccctgggagtgagagtatcaccttcctcaaggatttcagttataaccgggaagactttgccaaagcagggctgcaagtggaattcatcaaccccatcttcgagttctccagggccatgaatgagctgcaactcaatgatgccgagtttgccttgctcattgctatcagcatcttctctgcagaccggcccaacgtgcaggaccagctccaggtagagaggctgcagcacacatatgtggaagccctgcatgcctacgtctccatccaccatccccatgaccgactgatgttcccacggatgctaatgaaactggtgagcctccggaccctgagcagcgtccactcagagcaagtgtttgcactgcgtctgcaggacaaaaagctcccaccgctgctctctgagatctgggatgtgcacgaatgactgttctgtccccatattttctgttttcttggccggatggctgaggcctggtggctgcctcctagaagtggaacagactgagaagggcaaacattcctgggagctgggcaaggagatcctcccgtggcattaaaagagagtcaaagggttgcgagttttgtggctactgagcagtggagccctcgctaacactgtgctgtgtctgaagatcatgctgaccccacaaacggatgggcctgggggccactttgcacagggttctccagagccctgcccatcctgcctccaccacttcctgttt

SEQ ID NO: 51 - DNA, 1987 bp, Homo sapiens
  misc_feature: Incyte ID No: 413466.5
cgcgggccccacggtttgaccgggtcgtggcagccggagtcgtcttcgggacgcgcctgctcttcgcctttcgctgcagtccgtcgatttctttctccaggaagaaaaatggcatccgttgcagttgatccacaaccgagtgtggtgactcgggtggtcaacctgcccttggtgagctccacgtatgacctcatgtcctcagcctatctcagtacaaaggaccagtatccctacctgaagtctgtgtgtgagatggcagagaacggtgtgaagaccatcacctccgtggccatgaccagtgctctgcccatcatccagaagctagagccgcaaattgcagttgccaatacctatgcctgtaaggggctagacaggattgaggagagactgcctattctgaatcagccatcaactcagattgttgccaatgccaaaggcgctgtgactggggcaaaagatgctgtgacgactactgtgactggggccaaggattctgtggccagcacgatcacaggggtgatggacaagaccaaaggggcagtgactggcagtgtggagaagaccaagtctgtggtcagtggcagcattaacacagtcttggggagtcggatgatgcagctcgtgagcagtggcgtagaaaatgcactcaccaaatcagagctgttggtagaacagtacctccctctcactgaggaagaactagaaaaagaagcaaaaaaagttgaaggatttgatctggttcagaagccaagttattatgttagactgggatccctgtctaccaagcttcactcccgtgcctaccagcaggctctcagcagggttaaagaagctaagcaaaaaagccaacagaccatttctcagctccattctactgttcacctgattgaatttgccaggaagaatgtgtatagtgccaatcagaaaattcaggatgctcaggataagctctacctctcatgggtagagtggaaaaggagcattggatatgatgatactgatgagtcccactgtgctgagcacattgagtcacgtactcttgcaattgcccgcaacctgactcagcagctccagaccacgtgccacaccctcctgtccaacatccaaggtgtaccacagaacatccaagatcaagccaagcacatgggggtgatggcaggcgacatctactcagtgttccgcaatgctgcctcctttaaagaagtgtctgacagcctcctcacttctagcaaggggcagctgcagaaaatgaaggaatctttagatgacgtgatggattatcttgttaacaacacgcccctcaactggctggtaggtcccttttatcctcagctgactgagtctcagaatgctcaggaccaaggtgcagagatggacaagagcagccaggagacccagcgatctgagcataaaactcattaaacctgcccctatcactagtgcatgctgtggccagacagatgacaccttttgttatgttgaaattaacttgctaggcaaccctaaattgggaagcaagtagctagtataaaggccctcaattgtagttgtttccagctgaattaagagctttaaagtttctggcattagcagatgatttctgttcacctggtaagaaaagaatgataggcttgtcagagcctatagccagaactcagaaaaaattcaaatgcacttatgttctcattctatggccattgtgttgcctctgttactgtttgtattgaataaaaacatcttcatgtgggctggggtagaaactggtgtctgctctggtgtgatctgaaaaggcgtcttcactgctttatctcatgatgcttgcttgtaaaacttgattttagtttttcatttctcaaataggaatactacctttgaattcaataaaattcactgcaggatagaccagttacatgctgtttgttccatatgctttgtgtgttgctttcgtagagctgcttaacctgcatgacagagttattatacatac

SEQ ID NO: 52 - DNA, 3391 bp, Homo sapiens
  misc_feature: Incyte ID No: 3249239
ggagctgtctctggcttgcccatctgaaagccggtacatgaacatgaacttgagggcagttcaaaaagtgcttggctcagtgttgatgttgcagagacagaaaaaaatgggtagatgcaagtcctgctctcgagtttcctgtgtcattaaaatttaggctggtaggcacatcatctgtgtcagtattagttcaatgtatagttaggtttggctggcttaatctgggaaggcttcttgtagaaggtgacatctgggttgttatcatgggagaacaaggttgtgctgtggctgctagaaatcctgggaaagctggatttgagggatgctgtatcctgaggtaaggggcagagcctgtagcattgtagatatgaggcctttgtttttctgcgttgagcagggcatggggataactggggagagtgagacctggggagaaatgacaccctctctgtcacagacatggctgggctccctgctgttgttggtctgtctcctggcgagcaggagtatcaccgaggaggtgtcggagtactgtagccacatgattgggagtggacacctgcagtctctgcagcggctgattgacagtcagatggagacctcgtgccaaattacatttgagtttgtagaccaggaacagttgaaagatccagtgtgctaccttaagaaggcatttctcctggtacaatacataatggaggacaccatgcgcttcagagataacacccccaatgccatcgccattgtgcagctgcaggaactctctttgaggctgaagagctgcttcaccaaggattatgaagagcatgacaaggcctgcgtccgaactttctatgagacacctctccagttgctggagaaggtcaagaatgtctttaatgaaacaaagaatctccttgacaaggactggaatattttcagcaagaactgcaacaacagctttgctgaatgctccagccaaggccatgagaggcagtccgagggatcctccagcccgcagctccaggagtctgtcttccacctgctggtgcccagtgtcatcctggtcttgctggccgtcggaggcctcttgttctacaggtggaggcggcggagccatcaagagcctcagagagcggattctcccttggagcaaccagagggcagccccctgactcaggatgacagacaggtggaactgccagtgtagagggaattctaagctggacgcacagaacagtctctccgtgggaggagacattatggggcgtccaccaccacccctccctggccatcctcctggaatgtggtctgccctccaccagagctcctgcctgccaggactggaccagagcagccaggctggggcccctctgtctcaacccgcagacccttgactgaatgagagaggccagaggatgctccccatgctgccactatttattgtgagccctggaggctcccatgtgcttgaggaaggctggtgagcccggctcaggaccctcttccctcaggggctgcaccctcctctcactcccttccatgccggaacccaggccagggacccaccggcctgtggtttgtgggaaagcagggtggacgctgaggagtgaaagaaccctgcacccagagggcctgcctggtgccaaggtatcccagcctggacaggcatggacctgtctccagagagaggagcctgaagttcgtggggcgggacagcgtcggcctgatttcccgtaaaggtgtgcagcctgagagacgggaagaggaggcctctggacctgctggtctgcactgacagcctgaagggtctacaccctcggctcacctaagtgccctgtgctggttgccaggcgcagaggggaggccagccctgccctcaggacctgcctgacctgccagtgatgccaagagggggatcaagcactggcctctgcccctcctccttccagcacctgccagagcttctccaggaggccaagcagaggctcccctcatgaaggaagccattgcactgtgaacactgtacctgcctgctgaacagcctgcccccgtccatccatgagccagcatccgtccgtcctccactctccagcctctccccagcctcctgcactgagctggcctcaccagtcgactgagggagcccctcagccctgaccttctcctgacctggcctttgactccccggagtggagtggggtgggagaacctcctgggccgccagccagagccggtctttaggctgtgttgttcgcccaggtttctgcatcttgcactttgacattcccaagagggaagggactagtgggagagagcaagggaggggagggcacagacagagaggctacagggcgagctctgactgaagatgggcctttgaaatataggtatgcacctgaggttgggggagggtctgcactcccaaaccccagcgcagtgtcctttccctgctgccgacaggaacctggggctgagcaggttatccctgtcaggagccctggactgggctgcatctcagccccacctgcatggtatccagctcccatccacttctcacccttctttcctcctgaccttggtcagcagtgatgacctccaactctcacccaccccctctaccatcacctctaaccaggcaagccagggtgggagagcaatcaggagagccaggcctcagcttccaatgcctggagggcctccactttgtggccagcctgtggtggtggctctgaggcctaggcaacgagcgacagggctgccagttgcccctgggttcctttgtgctgctgtgtgcctcctctcctgccgccctttgtcctccgctaagagaccctgccctacctggccgctgggccccgtgactttcccttcctgcccaggaaagtgagggtcggctggccccaccttccctgtcctgatgccgacagcttagggaagggcagtgaacttgcatatggggcttagccttctagtcacagcctctatatttgatgctagaaaacacatatttttaaatggaagaaaaataaaaaggcattcccccttcatccccctaccttaaacatataatattttaaaggtagggggatgaagggggaatgccttaaacatataatattttaaaggtcaaaaaagcaatccaacccactgcagaagctctttttgagcacttggtggcatcagagcaggaggagccccagagccacctctggtgtccccccaggctacctgctcaggaaccccttctgttctctgagaagtcaagagaggacattggctcacgcactgtgagattttgtttttatacttggaagtggtgaattattttatataaagtcatttaaatatctatttaaaagataggaagctgcttatatatttaataataaaagaagtgcacaagctgcca

SEQ ID NO: 53 - DNA, 4231 bp, Homo sapiens
  misc_feature: Incyte ID No: 337518.18
gctgagaggagacagccagtgcgactccaccctccagctcgacggcagccgccccggccgacagccccgagacgacagcccggcgcgtcccggtccccacctccgaccaccgccagcgctccaggccccgccgctccccgctcgccgccaccgcgccctccgctccgcccgcagtgccaaccatgaccgccgccagtatgggccccgtccgcgtcgccttcgtggtcctcctcgccctctgcagccggccggccgtcggccagaactgcagcgggccgtgccggtgcccggacgagccggcgccgcgctgcccggcgggcgtgagcctcgtgctggacggctgcggctgctgccgcgtctgcgccaagcagctggggcgagctgtgcaccgagcgcgacccctgcgacccgcacaagggcctcttctgtgacttcggctccccggccaaccgcaagatcggcgtgtgcaccgccaaagatggtgctccctggcatcttcggtggtacggtgtaccgcagcggagagtccttccagagcagctgcaagtaccagtgcacgtgcctggacggggcggtgggctgcatgcccctgtgcagcatggacgttcgtctgcccagccctgactgccccttcccgaggagggtcaagctgcccgggaaatgctgcgaggagtgggtgtgtgacgagcccaaggaccaaaccgtggttgggcctgccctcgcggcttaccgactggaagacacgtttggcccagacccaactatgattagagccaactgcctggtccagaccacagagtggagcgcctgttccaagacctgtgggatgggcatctccacccgggttaccaatgacaacgcctcctgcaggctagagaagcagagccgcctgtgcatggtcaggccttgcgaagctgacctggaagagaacattaagaagggcaaaaagtgcatccgtactcccaaaatctccaagcctatcaagtttgagctttctggctgcaccagcatgaagacataccgagctaaattctgtggagtatgtaccgacggccgatgctgcaccccccacagaaccaccaccctgccggtggagttcaagtgccctgacggcgaggtcatgaagaagaacatgatgttcatcaagacctgtgcctgccattacaactgtcccggagacaatgacatctttgaatcgctgtactacaggaagatgtacggagacatggcatgaagccagagagtgagagacattaactcattagactggaacttgaactgattcacatctcatttttccgtaaaaatgatttcagtagcacaagttatttaaatctgtttttctaactgggggaaaagattcccacccaattcaaaacattgtgccatgtcaaacaaatagtctatcaaccccagacactggtttgaagaatgttaagacttgacagtggaactacattagtacacagcaccagaatgtatattaaggtgtggctttaggagcagtgggagggtaccagcagaaaggttagtatcatcagatagcatcttatacgagtaatatgcctgctatttgaagtgtaattgagaaggaaaattttagcgtgctcactgacctgcctgtagccccagtgacagctaggatgtgcattctccagccatcaagagactgagtcaagttgttccttaagtcagaacagcagactcagctctgacattctgattcgaatgacactgttcaggaatcggaatcctgtcgattagactggacagcttgtggcaagtgaatttgcctgtaacaagccagattttttaaaatttatattgtaaatattgtgtgtgtgtgtgtgtgtgtatatatatatatatgtacagttatctaagttaatttaaagttgtttgtgcctttttatttttgtttttaatgctttgatatttcaatgttagcctcaatttctgaacaccataggtagaatgtaaagcttgtctgatcgttcaaagcatgaaatggatacttatatggaaattctgctcagatagaatgacagtccgtcaaaacagattgtttgcaaaggggaggcatcagtgtccttggcaggctgatttctaggtaggaaatgtggtagcctcacttttaatgaacaaatggcctttattaaaaactgagtgactctatatagctgatcagttttttcacctggaagcatttgtttctactttgatatgactgtttttcggacagtttatttgttgagagtgtgaccaaaagttacatgtttgcacctttctagttgaaaataaagtgtatattttttatctcatttctcccagaattaaagatatactttagtgatctgcgtgataatatttataggtttatttacctatatttaaaaatgatcagtggctagacatgtctagaaatatatatggcctaatatgtaacttctctttgataaagtgaaaacaagtaatatataagctaatattattgaagcaatattttttggtacatacttacttattttattgttttcgatctgcatgcacaatatgaaatcataaaagcaacaaacatcaccacaccaacactgagtaagatcatttctatcaggccaaggaggtttatttttccagttacttgacttctgaacatgtttgccttctcatcaccaatggtcccagtctcattaagccaaagaataggcacaatatagttcctcttcagattctttaatacttgaattttttctgatggcttgaccaataggttgacctgcagccgttttgcaaattgtaaagtgaatccagttataggttcaatatccaagtatgtcctatgttcttcttcatttgggtttaatccatcaataggttctgaaacatcaggacttgcatacagaaaatgaggaagtgaaatgtacacaggtctcccttctttgcatttgctgatgtctagcacaccatatgatgtacaattttttgagataattttttctgtgcagaaacaatagttgtctgggttttcaactggagaggcaaaggccttggatggaagaacaaatctatacacagggattcctttcagattaacgtcggattcaaatacagcatagattgacctgcaaatatcagaagaaaagaactgcaatacctggcttttctcaacaaaaggtggaaatgaggctgcatctgtaccattaatcatgtcgcagtgactttcccaataggacagattccttttacctttatatgtgtcgattatggcaactttacttatgttatcttttccattgaaaactttataaactccatctgcagtattgttgtaaggataaaacagaccaactgtggtagtaacagggtacggaaccaaactcaaaaatggatccctatagccccataacagttctctcaaagttctgacttggaacatagaagattttgacttgttaataagtgaattgaggatcatttgaacaaattgattttgatagatatgggatgcagctgccacagccagattgagaactgtgaagttgtcagcctctgttccaactgatagtgaaggttcgaagatggcaccattgggctgcaggaaagagactgtgttgtcctcagcgtcctgggttacattttccttggctagaaaacgaactctgtacgtataaggacctctttgcttaacttgaatgttgctgctgttcatcatcacttcctgtggattttgcacatcaaagatccaaaactgtctgtaaacttctgtgcctgttttaacccaatttttaaaagcaattgtaccttcttcgaggacaacttgctttttaattgtcttctggataagcaggtctccaactggcattagaatacctccaaacacagccaggacagcaccaatgacagccccagcgatgagcccacagttccggtcacagcccatttttcttgttcaggaggtgaattagtgttaagcacctgtttcttgcaaactcctggatatgattaaagtggtttctacaagctctggttcttattcacaaatcaacagcaagacatgaattttacaggaaatgaactgatgagtcacagaaagaatcaattcgtctaatcattggaaagctatctttaaaatggctaagaaggatttttcaatcaaatgctccaacatttggacaattcttaataggatcaaatggtattctgcaggaaagtcctacactgcagtcctcat

SEQ ID NO: 54 - DNA, 2503 bp, Homo sapiens
  misc_feature: Incyte ID No: g3116213
agcaggggctggaggaggaagaagaggtggatccccggatccagggagaactggagaagttaaatcagtccacggatgatatcaacagacgggagactgaacttgaggatgctcgtcagaagttccgctctgttctggttgaagcaacggtgaaactggatgaactggtgaagaaaattggcaaagctgtggaagactccaagccctactgggaggcacggagggtggcgaggcaggctcagctggaagctcagaaagccacgcaggacttccagagggccacagaggtgctccgtgccgccaaggagaccatctccctggccgagcagcggctgctggaggatgacaagcggcagttcgactccgcctggcaggagatgctgaatcacgccactcagagggtcatggaggcggagcagaccaagaccaggagcgagctggtgcataaggagacggcagccaggtacaatgccgccatgggccgcatgcgacagctggagaagaaactcaagagagccatcaacaagtccaagccttattttgaactcaaggcaaagtactatgtgcagctcgagcaactgaaaaagactgtggatgacctgcaggccaaactgaccctggcaaaaggcgagtacaagatggccctgaagaacctggagatgatctcagatgagatccacgagcggcggcgctccagtgccatggggcctcggggatgcggtgttggtgctgagggcagcagcacatctgtggaggatctgccagggagcaaacctgagcctgatgccatttctgtggcctcggaggcctttgaagatgacagctgtagcaactttgtgtctgaagatgactcggaaacccagtccgtgtccagctttagttcaggaccaacaagcccgtctgagatgcctgaccagttccctgcggttgtgaggcctggcagcctggatctgcccagccctgtgtccctgtcagagtttgggatgatgttcccagtgttgggccctcgaagtgaatgcagcggggcctcctcccctgaatgtgaagtagaacgaggagacagggcagaaggggcagagaataaaacaagtgacaaagccaacaacaaccggggcctcagcagtagcagtggcagtggtggcagcagtaagagccaaagcagcacctcccctgagggccaggccttggagaaccggatgaagcagctctccctacagtgctcaaagggaagagatggaattattgctgacataaaaatggtgcagattggctgattcatcctgggccctggccgatgtgcatatcaacatttatacatggaactggagaacattgtgccaataatcatttaatatatgccaaatcttacacgtctactctaaactgctctaatgaagtttcagtgaccttgagggctaaagattgttcttctgggtaagagctcttgggctggtttttcagagcagagttcttgttgtgggtagactgtgactaggttcacagcctttgtggaacattccgtataacggcattgtggaagcaataactagttcctatgaaagaaccagagctgggaagatggctgggaagccaggccaaagtgggggcaacagcttgcttctctttctcttctcaccctcagtttgtatgggaaaatggagatgtcctctccactttatcccacgatatctaaatgaaaaagaaagaaaacccacacacaaagcaaaaactcaagtattaagagcacatatttttgacccagtggaggcttaaaaaaaaaaaaatccaagaacacaattcattttcaccacctctggtgttcagagggggcttttaaaaaagcgtgtatgctgggatacccattaaaaccattttctagaaggctaccatgagctgcactttttggggtgggaaaggtgaatgccagtggggatgcggggggatgagggtaggagggacttatagaaggggatttgtggctgtgggggagaaggttctacagcataagccttatcctgccagccaaggggatttattctaagagaagtgcatgtgaagaatggttgccactgttattagattgacaagatgttaatttctctgtaggttgtaactttaaaaataaatgaaattatttaagggttatgctgcactagtattccttagaggaaacagttctttaaagttaggaaagggagtaggcaggcatgtgttggcaaaggctgttaatagtagttaagtgttaagactgcttttctttaacgttttcatggtaatgcatatttagagcactgtatttttgtcttgttaagaaaatttagcatttctaaaagaaaaaagcaaccctctttcaaactgttaattctgtcacagcctgtatattttagtcatttgtaaatctcttcatacaatagtgacttcttttttgactgatacagtatcttaattacaaggttattttgtacttgtcttaatacactaagtgtaataaaaacggcttgag

SEQ ID NO: 55 - DNA, 2791 bp, Homo sapiens
  misc_feature: Incyte ID No: g5912216
acgcgtccggccgcggccggaggtatccgcatcggcgagctgcgtctcccgggtgtcggccccggcggctccccgaccgtgcccggctgtggcgaggcggctccagcccagcctgtggcagccgcgacccccggggcgctccggagcccactgcgcggcgcgcgtgccggctgcctgcatggacgcggcactgaagcggagccgctcggaggagccagccgaaatcctgccgcctgcccgggacgaggaggaggaggaggaagaggggatggagcaggggctggaggaggaagaagaggtggatccccggatccagggagaactggagaagttaaatcagtccacggatgatatcaacagacgggagactgaacttgaggatgctcgtcagaagttccgctctgttctggttgaagcaacggtgaaactggatgaactggtgaagaaaattggcaaagctgtggaagactccaagccctactgggaggcacggagggtggcgaggcaggctcagctggaagctcagaaagccacgcaggacttccagagggccacagaggtgctccgcgccgccaaggagacatctccctggccgagcagcggctgctggaggatgacaagcggcagttcgactccgcctggcaggagatgctgaatcacgccactcagagggtcatggaggcggagcagaccaagaccaggagcgagctggtgcataaggagacggcagccaggtacaatgccgccatgggccgcatgcgacagctggagaagaaactcaagagagccatcaacaagtccaagccttattttgaactcaaggcaaagtactatgtgcagctcgagcaactgaaaaagactgtggatgacctgcaggccaaactgaccctggcaaaaggcgagtacaagatggccctgaagaacctggagatgatctcagatgagatccacgagcggcggcgctccagtgccatggggcctcggggatgcggtgttggtgctgagggcagcagcacatctgtggaggatctgccagggagcaaacctgagcctgatgccatttctgtggcctcggaggcctttgaagatgacagctgtagcaactttgtgtctgaagatgactcggaaacccagtccgtgtccagctttagttcaggaccaacaagcccgtctgagatgcctgaccagttccctgcggttgtgaggcctggcagcctggatctgcccagccctgtgtccctgtcagagtttgggatgatgttcccagtgttgggccctcgaagtgaatgcagcggggcctcctcccctgaatgtgaagtagaacgaggagacagggcagaaggggcagagaataaaacaagtgacaaagccaacaacaaccggggcctcagcagtagcagtggcagtggtggcagcagtaagagccaaagcagcacctcccctgagggccaggccttggagaaccggatgaagcagctctccctacagtgctcaaagggaagagatggaattattgctgacataaaaatggtgcagattggctgattcatcctgggccctggccgatgtgcatatcaacatttatacatggaactggagaacattgtgccaataatcatttaatatatgccaaatcttacacgtctactctaaactgctctaatgaagtttcagtgaccttgagggctaaagattgttcttctgggtaagagctcttgggctggtttttcagagcagagttcttgttgtgggtagactgtgactaggttcacagcctttgtggaacattccgtataacggcattgtggaagcaataactagttcctatgaaagaaccagagctgggaagatggctgggaagccaggccaaagtgggggcaacagcttgcttctctttctcttctcaccctcagtttgtatgggaaaatggagatgtcctctccactttatcccacgatatctaaatgaaaaagaaagaaaacccacacacaaagcaaaaactcaagtattaagagcacatatttttgacccagtggaggcttaaaaaaaaaaaaatccaagaacacaattcattttcaccacctctggtgttcagagggggcttttaaaaaagcgtgtatgctgggatacccattaaaaccattttctagaaggctaccatgagctgcactttttggggtgggaaaggtgaatgccagtggggatgcggggggatgagggtaggagggacttatagaaggggatttgtggctgtgggggagaaggttctacagcataagccttatcctgccagccaaggggatttattctaagagaagtgcatgtgaagaatggttgccactgttattagattgacaagatgttaatttctctgtaggttgtaactttaaaaataaatgaaattatttaagggttatgctgcactagtattccttagaggaaacagttctttaaagttaggaaagggagtaggcaggcatgtgttggcaaaggctgttaatagtagttaagtgttaagactgcttttctttaacgttttcatggtaatgcatatttagagcactgtatttttgtcttgttaagaaaatttagcatttctaaaagaaaaaagcaaccctctttcaaactgttaattctgtcacagcctgtatattttagtcatttgtaaatctcttcatacaatagtgacttcttttttgactgatacagtatcttaattacaaggttattttgtacttgtcttaatacactaagtgtaataaaaacggcttgagaaaaaaaaaaaaaaaaa

SEQ ID NO: 56 - DNA, 1053 bp, Homo sapiens
  misc_feature: Incyte ID No: 992917.1
cgagagtcgtcggggtttcctgcttcaacagtgcttggacggaacccggcgctcgttccccaccccggccggccgcccatagccagccctccgtcacctcttcaccgcaccctcggactgccccaaggcccccgccgccgctccagcgccgcgcagccaccgccgccgccgccgcctctccttagtcgccgccatgacgaccgcgtccacctcgcaggtgccgccagaactaccaccaggactcagaggccgccatcaaccgccagatcaacctggagctctacgcctcctacgtttacctgtccatgtcttactactttgaccgcgatgatgtggctttgaagaactttgccaaatactttcttcaccaatctcatgaggagagggaacatgctgagaaactgatgaagctgcagaaccaacgaggtggcccgaatcttccttcaggatatcaagaaaccagactgtgatgactgggagagcgggctgaatgcaatggagtgtgcattacatttggaaaaaaatgtgaatcagtcactactggaactgcacaaactggccactgacaaaaatgacccccatttgtgtgacttcattgagacacattacctgaatgagcaggtgaaagccatcaaagaattgggtgaccacgtgaccaacttgcgcaagatgggagcgcccgaatctggcttggcggaatatctctttgacaagcacaccctgggagacagtgataatgaaagctaagcctcgggctaatttccccatagccgtggggtgacttccctggtcaccaaggcagtgcatgcatgttggggtttcctttaccttttctataagttgtaccaaaacatccacttaagttctttgatttgtaccattccttcaaataaagaaatttggtacccaggtgttgtctttgaggtcttgggatgaatcagaaatctatccaggctatcttccagattccttaagtgccgttgttcagttctaatcacactaatcaaaaagaaacgagtatttgtatttattaaactcattagtttgggcagt

SEQ ID NO: 57 - DNA, 1235 bp, Homo sapiens
  misc_feature: Incyte ID No: 411424.12
tagttcaagacaacagagacaaagctaagatgaggaagttctgtacagtttaggaaatagaggctttcaaagataattcgcagtgatgtgaaactgggcctcccaagccctgataacaacatggccaacgccctggccagcgccacttgcgagcgctgcaagggcggctttgcgcccgctgagaagatcgtgaacagtaatggggagctgtaccatgagcagtgtttcgtgtgcgctcagtgcttccagcagttcccagaaggactcttctatgagtttgaaggaagaaagtactgtgaacatgactttcagatgctctttgccccttgctgtcatcagtgtggtgaattcatcattggccgagttatcaaagccatgaataacagctggcatccggagtgcttccgctgtgacctctgccaggaagttctggcagatatcgggtttgtcaagaatgctgggagacacctgtgtcgcccctgtcataatcgtgagaaagccagaggccttgggaaatacatctgccagaaatgccatgctatcatcgatgagcagcctctgatattcaagaacgacccctaccatccagaccatttcaactgcgccaactgcgggaaggagctgactgccgatgcacgggagctgaaaggggagctatactgcctcccatgccatgataaaatgggggtccccatctgtggtgcttgccgacggcccatcgaagggcgcgtggtgaacgctatgggcaagcagtggcatgtggagcattttgtttgtgccaagtgtgagaaaccctttcttggacatcgccattatgagaggaaaggcctggcatattgtgaaactcactataaccagctatttggtgatgtttgcttccactgcaatcgtgttatagaaggtgatgtggtctctgctcttaataaggcctggtgcgtgaactgctttgcctgttctacctgcaacactaaattaacactcaagaataagtttgtggagtttgacatgaagccagtctgtaagaagtgctatgagatttccattggagctgaagaaaagacttaagaaactagctgagaccttaggaaggaaataagttcctttattttttcttttctatgcaagataagagattaccaacattacttgtcttgatctacccatatttaaagctatatctcaaagcagttgagagaagaggacctatatgaatggttttatgtcatttttttaaa

SEQ ID NO: 58 - DNA, 1653 bp, Homo sapiens
  misc_feature: Incyte ID No: 995600.17
  unsure 1635: a, t, c, g, or other
cggggggaccggcccgccgaccgccgccgccgtgtgcagcctatcaagctggccagagtcaccaaggtcctgggcaggaccggttctcagggacagtgcacgcaggtaatcgggtgggggcatttggccgactgccgattacctgcgtgcactgtccctgctctaacccctgccagccggaatccgggagccgattctcatttcatcacagggttctgatggttccctttaacgatctgtattctggccccgacacgttctctgaattcatatctgcttcccactccgcggtgcctttccgcggcccgcccttacttcttcctccactccggtggggacccgtaggtgcgcgtggaattcatggacgacacgagccgatccatcatccgcaatgtaaaaggccccgtgcgcgagggcgacgtgctcacccttttggagtcagagcgagaagcccggaggttgcgctgagcttggctgctcgctgggtcttggatgtcgggttcgaccacttggccgatgggaatggtctgtcacaatctgctccttttttttgtccgccacacgtaactgagatgctcctttaaataaagcgtttgtgtttcaagttaactcaggttcttgtatgggctatacgactagggtttctccaggtttcttgagtggctcccaggcggtcaccgatcctccgcactctggaaatcctggccgtgcggtcttgccaaacgaagcttttcctttttgaggcggggggtcgtgtttgtcgattgcaccctctaccccaaacaaaacacaagcgtagtaggaatgttttattagcaaagaagtttcagagtgggtggatcagggctctatcacttggtccccacctcaccttggtggggccagagtgagccccttcctgccacagtcaccccaactgaaattgcctttctcttcggccagtgttagcctctgagcaggggaccctggacccttctgtgcgccaaaggctgaggtgactgacgaggagatctccccacagctaggtgtagtgagccagacgaggcagcttactgaacctgggggttctctccattgtcaccgcattctccttcaccaggtgtggctgtctggggagccagggggtgactcgctctggagagaggggaaaagaggggggcctgctgcaatctccttgaggcaggaaacgtgggattcagccccagcctcacttagtggaggttcttttaccatggacccaggctgcctggtttgtatccaacctctgccccttctgacctggaagaggcgcttgaccttcctcccacatcccttccagtggggtgagtacaggtgttcctcagtttacaatgggttacattccggtgagtacatcataggttgaaagtattgcaagttgaaatgtgtttaatacacctaatctcccaaacatcacagcttagcatggtccatcttaagcttgttcagaacgccttagcctgtagttggggaaactcgtctaacacgaagcctgttttaataaagtattgaatgtcttatgtaatttattgaatactctgctgaagtgtggtttttactaagcacacattgcttttatgctatcatgaagtcaaaaaattgtaagttgtgccaggngcgatggctcacagctgt

SEQ ID NO: 59 - DNA, 2782 bp, Homo sapiens
  misc_feature: Incyte ID No: 441292.7
aaacacggtgaaaagaaaccgcccattacacaccccagtacaccagcagaggaaacttataacctcgggaggcaggtccttcccctgcagtgcggtcacatacttccagaagagcggaccaggggctgctgccagcacctgccactcagagcgcctctgtcgctgggacccttcagaactctctttgctcacaagttaccaaaaaaaaaagagccaacatgttggtattgctggctggtatctttgtggtccacatcgctactgttattatgctatttgttagcaccattgccaatgtctggttggtttccaatacggtagatgcatcagtaggtctttggaaaaactgtaccaacattagctgcagtgacagcctgtcatatgccagtgaagatgccctcaagacagtgcaggccttcatgattctctctatcatcttctgtgtcattgccctcctggtcttcgtgttccagctcttcaccatggagaagggaaaccggttcttcctctcaggggccaccacactggtgtgctggctgtgcattcttgtgggggtgtccatctacactagtcattatgcgaatcgtgatggaacgcagtatcaccacggctattcctacatcctgggctggatctgcttctgcttcagcttcatcatcggcgttctctatctggtcctgagaaagaaataaggccggacgagttcatggggatctggggggtggggaggaggaagccgttgaatctgggagggaagtggaggttgctgtacaggaaaaaccgagataggggaggggggagggggaagcaaaggggggaggtcaaatcccaaaccattactgaggggattctctactgccaagcccctggccctggggagaaagtagttggctagtactttgatgctcccttgatggggtccagagagcctccctgcagccaccagacttggcctccagctgttcttagtgacacacactgtctggggccccatcagctgccacaacaccagccccacttctgggtcatgcactgaggtccacagacctactgcactgagttaaaatagcggtacaagttctggcaagagcagatactgtctttgtgctgaatacgctaagcctggaagccatcctgcccttctgacccaaagcaaaacatcacattccagtctgaagtgcctactggggggctttggcctgtgagccattgtccctctttggaacagatatttagctctgtggaattcagtgacaaaatgggaggaggaaagagagtttgtaaggtcatgctggtgggttagctaaaccaagaaggagaccttttcacaatggaaaacctgggggatggtcagagcccagtcgagacctcacacacggctgtccctcagggagacctcatgccatggtctttgctaggcctcttgctgaaagccaaggcagctcttctggagtttctctaaagtcactagtgaacaattcggtggtaaaagtaccacacaaactatgggatccaaggggcagtcttgcaacagtgccatgttagggttatgtttttaggattcccctcaatgcagtcagtgtttcttttaagtatacaacaggagagagatggacatggctcattgtagcacaatcctattactcttcctctaacatttttgaggaagttttgtctaattatcaatattgaggatcagggctcctaggctcagtggtagctctggcttagacaccacctggagtgatcacctcttggggaccctgcctatcccacttcacaggtgaggcatggcaattctggaagctgattaaaacacacataaaccaaaaccaaacaacaggcccttgggtgaaaggtgctatataattgtgaagtattaagcctaccgtatttcagccatgataagaacagagtgcctgcattcccaggaaaatacgaaaatcccatgagataaataaaaatataggtgatgggcagatcttttctttaaaataaaaaagcaaaaactcttgtggtacctagtcagatggtagacgagctgtctgctgccgcaggagcacctctatacaggacttagaagtagtatgttattcctggttaagcaggcattgctttgccctggagcagctattttaagccatctcagattctgtctaaaggggttttttgggaagacgttttctttatcgccctgagaagatctaccccagggagaatctgagacatcttgcctacttttctttattagctttctcctcattcatttcttttatacctttcctttttggggagttgttatgccatgatttttggtatttatgtaaaaggattattactaattctatttctctatgtttattctagttaaggaaatgttgagggcaagccaccaaattacctaggctgaggttagagagattggccagcaaaaactgtgggaagatgaactttgtcattatgatttcattatcacatgattatagaaggctgtcttagtgcaaaaaacatacttacatttcagacatatccaaagggaatactcacattttgttaagaagttgaactatgactggagtaaaccatgtattcccttatcttttactttttttctgtgacatttatgtctcatgtaatttgcattactctggtggattgttctagtactgtattgggcttcttcgttaatagattatttcatatactataattgtaaatattttgatacaaatgtttataactctagggatataaaaacagattctgattcccttcaaaaaaa

SEQ ID NO: 60 - DNA, 2348 bp, Homo sapiens
  misc_feature: Incyte ID No: 042176.5
cgccctttttttttttccccagggagtgggggctggcccttactgctttataagcaccagctcaagaaggaacctacagcctcttggaaaggaatctcactaggggcttgactgcgtgggtctgtagcgctttcactgtaagaaagcaagatgcattttagaaactttaactacagttttagctccctgattgcctgtgtggcaaacagtgatatcttcagcgaaagtgaaaccagggccaaatttgagtccctctttaggacgtatgacaaggacatcacctttcagtattttaagagcttcaaacgagtcagaataaacttcagcaaccccttctccgcagcagatgccaggctccagctgcataagactgagtttctgggaaaggaaatgaagttatattttgctcagaccttacacataggaagctcacacctgggctccgccaaatccagacaagcagtttctgatctcccctcccgcctctccgccagtgggatggaaacaagtggaagatgcgaccccagtcataaactatgatctcttatatgccatctccaagctggggccaggggaaaagtatgaattgcacgcagcgactgacaccactcccagcgtggtggtccatgtatgtgagagtgatcaagagaaggaggaagaagaggaaatggaaagaatgaggagacctaagccaaaaattatccagaccaggaggccggagtacacgccgatccacctcagctgaactggcacgcgacgaggacgcattccaaatcatactcacgggaggaatcttttactgtggaggtggctggtcacgacttcttcggaggtggcagccgagatcggggtggcagaaatcccagttcatgttgctcagaagagaatcaaggccgtgtccccttgttctaatgctgcacaccagttactgttcatggcacccgggaatgacttgggccaatcactgagtttgtggtgatcgcacaaggacatttgggactgtcttgagaaaacagataatgatagtgttttgtacttgttcttttctggtaggttctgtctgtgccaagggcaggttgatcagtgagctcaggagagagcttcctgtttctaagtggcctgcaggggccactctctactggtaggaagaggtaccacaggaagccgcctagtgcagagaggttgtgaaaacagcagcaatgcaatgtggaaattgtagcgtttcctttcttccctcatgttctcatgtttgtgcatgtatattactgatttacaagactaacctttgttcgtatataaagttacaccgttgttgttttacatcttttgggaagccaggaaagcgtttggaaaacgtatcacctttcccagattctcggattctcgactctttgcaacagcacttgcttgcggaactcttcctggaatgcattcactcagcatccccaaccgtgcaacgtgtaacttgtgcttttgcaaaagaagttgatctgaaattcctctgtagaatttagcttatacaattcagagaatagcagtttcactgccaacttttagtgggtgagaaattttagtttaggtgtttgggatcggacctcagtttctgttgtttcttttatgtggtggtttctatacatgaatcatagccaaaaacttttttggaaactgttggttgagatagttggttcttttaccccacgaagacatcaagatacacttgtaaataaagctgatagcatatattcatacctgttgtacacttgggtgaaaagtatggcagtgggagactaagatgtattaacctacctgtgaatcatatgttgtaggaaaagctgttcccatgtctaacaggacttgaattcaaagcatgtcaagtggatagtagatctgtggcgatatgagagggatgcagtgcctttccccattcattcctgatggaattgttatactaggttaacatttgtaatttttttctagttgtaatgtgtatgtctggtaaataggtattatattttggccttacaataccgtaacaatgtttgtcattttgaaatacttaatgccaagtaacaatgcatgctttggaaatttggaagatggttttattctttgagaagcaaatatgtttgcattaaatgctttgattgttcatatcaagaaattgattgaacgttctcaaaccctgtttacggtacttggtaagagggagccggtttgggagagaccattgcatcgctgtccaagtgtttcttgttaagtgcttttaaactggagaggctaacctcaaaatattttttttaactgcattctataataaatgggcacagtatgctccttacagaaaaaaa

SEQ ID NO: 61 - DNA, 3668 bp, Homo sapiens
  misc_feature: Incyte ID No: 234537.3
gtcgcatgcaaacgtgcgtgagctcggagttcggctcgatgacccgggccccgcccctccagccggggcaccgagccccggccctagctgctcgcccctactcgccggcactcgcccggctcgcccgctttcgcacccagttcacgcgccacagctatgtgtccccgagccgcgcgggcgcccgcgacgctactcctcgccctgggcgcggtgctgtggcctgcggctggcgcctgggagcttacgattttgcacaccaacgacgtgcacagccggctggagcagaccagcgaggactccagcaagtgcgtcaacgccagccgctgcatgggtggcgtggctcggctcttcaccaaggttcagcagatccgccgcgccgaacccaacgtgctgctgctggacgccggcgaccagtaccagggcactatctggttcaccgtgtacaagggcgccgaggtggcgcacttcatgaacgccctgcgctacgatgccatggcactgggaaatcatgaatttgataatggtgtggaaggactgatcgagccactcctcaaagaggccaaatttccaattctgagtgcaaacattaaagcaaaggggccactagcatctcaaatatcaggactttatttgccatataaagttcttcctgttggtgatgaagttgtgggaatcgttggatacacttccaaagaaaccccttttctctcaaatccagggacaaatttagtgtttgaagatgaaatcactgcattacaacctgaagtagataagttaaaaactctaaatgtgaacaaaattattgcactgggacattcgggttttgaaatggataaactcatcgctcagaaagtgaggggtgtggacgtcgtggtgggaggacactccaacacatttctttacacaggcaatccaccttccaaagaggtgcctgctgggaagtacccattcatagtcacttctgatgatgggcggaaggttcctgtagtccaggcctatgcttttggcaaatacctaggctatctgaagatcgagtttgatgaaagaggaaacgtcatctcttcccatggaaatcccattcttctaaacagcagcattcctgaagatccaagcataaaagcagacattaacaaatggaggataaaattggataattattctacccaggaattagggaaaacaattgtctatctggatggctcctctcaatcatgccgctttagagaatgcaacatgggcaacctgatttgtgatgcaatgattaacaacaacctgagacacgcggatgaaatgttctggaaccacgtatccatgtgcattttaaatggaggtggtatccggtcgcccattgatgaacgcaacaatggcacaattacctgggagaacctggctgctgtattgccctttggaggcacatttgacctagtccagttaaaaggttccaccctgaagaaggcctttgagcatagcgtgcaccgctacggccagtccactggagagttcctgcaggtgggcggaatccatgtggtgtatgatctttcccgaaaacctggagacagagtagtcaaattagatgttctttgcaccaagtgtcgagtgcccagttatgaccctctcaaaatggacgaggtatataaggtgatcctcccaaacttcctggccaatggtggagatgggttccagatgataaaagatgaattattaagacatgactctggtgaccaagatatcaacgtggtttctacatatatctccaaaatgaaagtaatttatccagcagttgaaggtcggatcaagttttccacaggaagtcactgccatggaagcttttctttaatatttctttcactttgggcagtgatctttgttttataccaatagccaaaaattctccttgcctttaatgtgtgaaactgcattttttcaagtgagattcaaatctgccttttaggacctggctttgtgacagcaaaaaccatctttacaggctcctagaagctgaaggttagagcattataaaatgaagagacagacatgattactcagggtcagcaacctagtgagttagaaaaaaaattaacatagggccctataaggagaaagccaactatgttaagtttacgtgtccaaattttaatgaaattttactaacaattttaaaccatatttttcttcttcatatccatttctaatccatcaaacagcttatgtttacataaaattttatcattcacaaggaagttttaagcacactgtctcatttgatatccacaacttatttttggtaggaaagagagatgtttttcccaccgtgtcagatgaaaaaacttgaagctcaaaaagggttgacgttgaccatacagctaatgctgacagatccaagacctagacctaggtcttttgaactcaagtccagcattctcaactatatcaagttactgttcagaatacttaatatctcctctcttcataattatcaatagccccaagctcatggatgacaaatctctgctttatttcttgtctctattttttcactttatagctcctgttataatagcaagtttaatggtataaacacaggataccatcctctcttgcaacacccatgtgcctttgatgagtcaggtagcaagctgtagtagataatgagaaaggccagaggctgcaaaagacagtcaaaggacacgagagaaaggaaggggaagaacaggactccaggactgttttatattatagaaaagcaagagctaaagagcatttacacatgttaaacagatacttgttaagcatagtgcctgacacacggcattagctgttattttatgagattccatgcagctctgcctctgtcctctttcttctaacatgaaggtatcatgagaagagaaccttctaacataagctgtaattctaaacctgcacttgtccctctccagcaagaggctagcactgaattcattctactcatactacacacccagttatggaatgtccagagttctcgaagaaaataaatgactttaggaagaggtatacattttttaagtcgctctgcctccaaatctgaacagtcactgtaaatcattcttaagcccagatatgagaacttctgctggaaagtgggaccctctgagtgggtggtcagaaaatacccatgctgatgaaatgacctatgcccaaagaacaaatacttaacgtgggagtggaaccacatgagcctgctcagctctgcataagtaattcaagaaatgggaggcttcaccttaaaaacagtgtgcaaatggcagctagaggttttgataggaagtatgtttgtttcttagtgtttacaaatattaagtactcttgatacaaaatatacttttaaacttcataacctttttataaaagttgttgcagcaaaataatagcctcggttctatgcatatatggattagctataaaaaatgtcaataagattgtacaaggaaaattagagaaaggcacatttagggtttattttttacacttggccagtaaaatagggtaaatcctattagaattttttaaagaactttttttaagtttcctaaatctgtgtgtgtattgtgaagtggtataagaaatgactttgaaccactttgcaattgtagattcccaacaataaaattgaagataagctcttt

SEQ ID NO: 62 - DNA, 1870 bp, Homo sapiens
  misc_feature: Incyte ID No: 470468.21
agggtacacacagtgacagtgccagctccacattcccgaccaccgggccagggctggttccacgctgtcatttctctccgctggccccagccgcggggccaccgccagacagacagaccggggatcctgcctggcggcgtgaccttgggttagtcctagagccgcttctagcccggtttcctccgccccaggttaggaccacgtgggtggttccctcattcgagtgctccggcgcacagacccgcgccccgccgtctgcgagcctcccgagagccgtcccttcgtccggccctggagcattgcgtttgtcgccggtgtcgcagtgcgaggatggcgccgcgggtgtagcggctctctgcgcaggccgagtgggcccagagaagcgaggaactccgcagctcgtcgacacgtctcgtctcctgtcccaattcagggcttggtgaggtgactcgcggtcgcgggtgactcgccggcaggacactgcctggaacgcctggagcgcctcccactgcagacgtctgtccgcctccagccgctctcctctgacgggtcctgcctcagttggcggaatggcggccacgggagccaatgcagagaaagctgaaagtcacaatgattgccccgtcagacttttaaatccaaacatagcaaaaatgaaagaagatattctctatcatttcaatctcaccactagcagacacaatttcccagccttgtttggagatgtgaagtttgtgtgtgttggtggaagcccctcccggatgaaagccttcatcaggtgcgttggtgcagagctgggccttgactgcccaggtagagactatcccaacatctgtgcgggaactgaccgctatgccatgtataaagtaggaccggtgctgtctgtcagtcatggtatgggcattccttctatctcaatcatgttgcatgagctcataaagctgctgtactatgcccggtgctccaacgtcactatcatccgcattggcacttctggtgggataggtctggagcccggcactgtggtcataacagagcaggcagtggatacctgcttcaaggcagagtttgagcagattgtcctggggaagcgggtcatccggaaaacggaccttaacaagaagctggtgcaggagctgttgctgtgttctgcagagctgagcgagttcaccacagtggtggggaacaccatgtgcaccttggacttctatgaagggcaaggccgtctggatggggctctctgctcctacacggagaaggacaagcaggcgtatctggaggcagcctatgcagccggcgtccgcaatatcgagatggagtcctcggtgtttgccgccatgtgcagcgcctgcggcctccaagcggccgtggtgtgtgtcaccctcctgaaccgcctggaaggggaccagatcagcagccctcgcaatgtgctcagcgagtaccagcagaggccgcagcggctggtgagctacttcatcaagaagaaactgagcaaggcctgagcgctgccctgcacctccgcagacctgctgtgatgacttgccattaaaagcattgtccaaaatcccctgttgtgtggactttgagcacactttacacaagaatctagaaaatcagatcgcgattaagagacagagaatcttggattaaccgcatgggagatgttcttccttttgaagtttcattggagcattttcaatgatgttagcctgatttggggtttcttcaagaacattctaccaaatttttgtactatttctagggaaatttttcagactttaaaattctaatggtagtcagatttcatgtcactaaacaagaaatctgacaatagtgccagataactaagttcttgatcacttactactta

SEQ ID NO: 63 - DNA, 2350 bp, Homo sapiens
  misc_feature: Incyte ID No: 240120.3
  unsure 1254: a, t, c, g, or other
gctacgcgggccacgctgctggctggcctgacctaggcgcgcggggtcgggcggccgcgcgggcgggctgagtgagcaagacaagacactcaagaagagcgagctgcgcctgggtcccggccagggttgcacgcagaggcgggcggcagacggtgcccggcggaatctcctgagctccgccgcccagctctggtgccagcgcccagtggccgccgcttcgaaagtgactggtgcctcgccgcctcctctcggtgcgggaccatgaagctgctgccgtcggtggtgctgaagctctttctggctgcagttctctcggcactggtgactggcgagagcctggagcggcttcggagagggctagctgctggaaccagcaacccggaccctcccactgtatccacggaccagctgctacccctaggaggcggccgggaccggaaagtccgtgacttgcaagaggcagatctggaccttttgagagtcactttatcctccaagccacaagcactggccacaccaaacaaggaggagcacgggaaaagaaagaagaaaggcaaggggctagggaagaagagggacccatgtcttcggaaatacaaggacttctgcatccatggagaatgcaaatatgtgaaggagctccgggctccctcctgcatctgccacccgggttaccatggagagaggtgtcatgggctgagcctcccagtggaaaatcgcttatatacctatgaccacacaaccatcctggccgtggtggctgtggtgctgtcatctgtctgtctgctggtcatcgtggggcttctcatgtttaggtaccataggagaggaggttatgatgtggaaaatgaagagaaagtgaagttgggcatgactaattcccactgagagagacttgtgctcaaggaatcggctggggactgctacctctgagaagacacaaggtgatttcagactgcagaggggaaagacttccatctagtcacaaagactccttcgtccccagttgccgtctaggattgggcctcccataattgctttgccaaaataccagagccttcaagtgccaaacagagtatgtccgatggtatctgggtaagaagaaagcaaaagcaagggaccttcatgcccttctgattcccctccaccaaaccccacttcccctcataagtttgtttaaacacttatcttctggattagaatgccggttaaattccatatgctccaggatctttgactgaaaaaaaaaaagangaagaagaaggagagcaagaaggaaagatttgtgaactggaagaaagcaacaaagattgagaagccatgtactcaagtaccaccaagggatctgccattgggaccctccagtgctggatttgatgagttaactgtgaaataccacaagcctgagaactgaattttgggacttctacccagatggaaaaataacaactatttttgttgttgttgtttgtaaatgcctcttaaattatatatttattttattctatgtatgttaatttatttagtttttaacaatctaacaataatatttcaagtgcctagactgttactttggcaatttcctggccctccactcctcatccccacaatctggcttagtgccacccacctttgccacaaagctaggatggttctgtgacccatctgtagtaatttattgtctgtctacatttctgcagatcttccgtggtcagagtgccactgcgggagctctgtatggtcaggatgtaggggttaacttggtcagagccactctatgagttggacttcagtcttgcctaggcgattttgtctaccatttgtgttttgaaagcccaaggtgctgatgtcaaagtgtaacagatatcagtgtctccccgtgtcctctccctgtcaagtctcagaagaggttgggcttccatgcctgtagctttcctggtccctcacccccatggccccaggcccacagcgtgggaactcactttcccttgtgtcaagacatttctctaactcctgccattcttctggtgctactccatgcaggggtcagtgcagcagaggacagtctggagaaggtattagcaaagcaaaaggctgagaaggaacagggaacattggagctgactgttcttggtaactgattacctgccaattgctaccgagaaggttggaggtggggaaggctttgtataatcccacccacctcaccaaaacgatgaaggtatgctgtcatggtcctttctggaagtttctggtgccatttctgaactgttacaacttgtatttccaaacctggttcatatttatactttgcaatccaaataaagataacccttattccataaaaaaa

SEQ ID NO: 64 - DNA, 831 bp, Homo sapiens
  misc_feature: Incyte ID No: 028779.3
gcactcccaaagaactgggtactcaacactgagcagatctgttctttgagctaaaaaccatgtgctgtaccaagagtttgctcctggctgctttgatgtcagtgctgctactccacctctgcggcgaatcagaagcagcaagcaactttgactgctgtcttggatacacagaccgtattcttcatcctaaatttattgtgggcttcacacggcagctggccaatgaaggctgtgacatcaatgctatcatctttcacacaaagaaaaagttgtctgtgtgcgcaaatccaaaacagacttgggtgaaatatattgtgcgtctcctcagtaaaaaagtcaagaacatgtaaaaactgtggcttttctggaatggaattggacatagcccaagaacagaaagaaccttgctggggttggaggtttcacttgcacatcatggagggtttagtgcttatctaatttgtgcctcactggacttgtccaattaatgaagttgattcatattgcatcatagtttgctttgtttaagcatcacattaaagttaaactgtattttatgttatttatagctgtaggttttctgtgtttagctatttaatactaattttccataagctattttggtttagtgcaaagtataaaattatatttgggggggaataagattatatggactttcttgcaagcaacaagctattttttaaaaaaaactatttaacattcttttgtttatattgttttgtctcctaaattgttgtaattgcattataaaataagaaaaatattaataagacaaatattgaaaataaagaaacaaaaagttaaaaaaaa

SEQ ID NO: 65 - DNA, 892 bp, Homo sapiens
  misc_feature: Incyte ID No: 238627.2
gaaacacagcctacgcacgaaagtgcactaggaggaaggatattataaagtgatgcaaacagaaattccaccagcctccatgtatcatcatgtgtcataactcagtcaagctcagtgagcattctcagcacattgcctcaacagcttcaaggtgagccagctcaagactttgctctccaccaggcagaagatgacagactgtgaatttggatatatttacaggctggctcaggactatctgcagtacgtcctacagataccacaacctggatcaggtccaagcaaaacgtccagagtgctacaaaatgttgcgttctcagtccaaaaagaagtggaaaagaatctgaagtcatgcttggacaatgttaatgttgtgtccgtagacactgccagaacactattcaaccaagtgatggaaaaggagtttgaagacggcatcattaactggggaagaattgtaaccatatttgcatttgaaggtattctcatcaagaaacttctacgacagcaaattgccccggatgtggatacctataaggagatttcatattttgttgcggagttcataatgaataacacaggagaatggataaggcaaaacggaggctgggaaaatggctttgtaaagaagtttgaacctaaatctggctggatgacttttctagaagttacaggaaagatctgtgaaatgctatctctcctgaagcaatactgttgaccagaaaggacactccatattgtgaaaccggcctaatttttctgactgatatggaaacgattgccaacacatacttctacttttaaataaacaactttgatgatgtaacttgaccttccagagttatggaaattttgtccccatgtaatgaataaattgtatgtatttttctct

SEQ ID NO: 66 - DNA, 4595 bp, Homo sapiens
  misc_feature: Incyte ID No: 254107.1
ggatccagctgtctctccttgcgatcctgtcttcggggaagtccacgtcctaggcaggtcctcccaaagtgcccttggtgccgatcacccctcccagcgtcttgcaggtcctgtgcaccacctcccccactccccattcaaagccctcttctctgaagtctccggttcccagagctcttgcaatccaggctttccttggaagtggctgtaacatgtatgaaaagaaagaaaggaggaccaagagatgaaagagggctgcacgcgtgggggcccgagtggtgggcggggacagtcgtcttgttacaggggtgctggccttccctggcgcctgcccctgtcggccccgcccgagaacctccctgcgccagggcagggtttactcatcccggcgaggtgatcccatgcgcgagggcgggcgcaagggcggccagagaacccagcaatccgagtatgcggcatcagcccttcccaccaggcacttccttccttttcccgaacgtccagggagggagggccgggcacttataaactcgagccctggccgatccgcatgtcagaggctgcctcgcaggggctgcgcgcagcggcaagaagtgtctgggctgggacggacaggagaggctgtcgccatcggcgtgcctgtgcccctctgctccggcacggccctgtcgcagtgcccgcgctttccccggcgcctgcacgcggcgcgcctgggtaacatgcttggggtcctggtccttggcgcgctggccctggccggcctggggttccccgcacccgcagagccgcagccgggtggcagccagtgcgtcgagcacgactgcttcgcgctctacccgggccccgcgaccttcctcaatgccagtcagatctgcgacggactgcggggccacctaatgacagtgcgctcctcggtggctgccgatgtcatttccttgctactgaacggcgacggcggcgttggccgccggcgcctctggatcggcctgcagctgccacccggctgcggcgaccccaagcgcctcgggcccctgcgcggcttccagtgggttacgggagacaacaacaccagctatagcaggtgggcacggctcgacctcaatggggctcccctctgcggcccgttgtgcgtcgctgtctccgctgctgaggccactgtgcccagcgagccgatctgggaggagcagcagtgcgaagtgaaggccgatggcttcctctgcgagttccacttcccagccacctgcaggccactggctgtggagcccggcgccgcggctgccgccgtctcgatcacctacggcaccccgttcgcggcccgcggagcggacttccaggcgctgccggtgggcagctccgccgcggtggctcccctcggcttacagctaatgtgcaccgcgccgcccggagcggtccaggggcactgggccagggaggcgccgggcgcttgggactgcagcgtggagaacggcggctgcgagcacgcgtgcaatgcgatccctggggctccccgctgccagtgcccagccggcgccgccctgcaggcagacgggcgctcctgcaccgcatccgcgacgcagtcctgcaacgacctctgcgagcacttctgcgttcccaaccccgaccagccgggctcctactcgtgcatgtgcgagaccggctaccggctggcggccgaccaacaccggtgcgaggacgtggatgactgcatactggagcccagtccgtgtccgcagcgctgtgtcaacacacagggtggcttcgagtgccactgctaccctaactacgacctggtggacggcgagtgtgtggagcccgtggacccgtgcttcagagccaactgcgagtaccagtgccagcccctgaaccaaactagctacctctgcgtctgcgccgagggcttcgcgcccattccccacgagccgcacaggtgccagatgttttgcaaccagactgcctgtccagccgactgcgaccccaacacccaggctagctgtgagtgccctgaaggctacatcctggacgacggtttcatctgcacggacatcgacgagtgcgaaaacggcggcttctgctccggggtgtgccacaacctccccggtaccttcgagtgcatctgcgggcccgactcggcccttgcccgccacattggcaccgactgtgactccggcaaggtggacggtggcgacagcggctctggcgagcccccgcccagcccgacgcccggctccaccttgactcctccggccgtggggctcgtgcattcgggcttgctcataggcatctccatcgcgagcctgtgcctggtggtggcgcttttggcgctcctctgccacctgcgcaagaagcagggcgccgccagggccaagatggagtacaagtgcgcggccccttccaaggaggtagtgctgcagcacgtgcggaccgagcggacgccgcagagactctgagcggcctccgtccaggagcctggctccgtccaggagcctgtgcctcctcacccccagctttgctaccaaagcaccttagctggcattacagctggagaagaccctccccgcaccccccaagctgttttcttctattccatggctaactggcgagggggtgattagagggaggagaatgagcctcggcctcttccgtgacgtcactggaccactgggcaatgatggcaattttgtaacgaagacacagactgcgatttgtcccaggtcctcactaccgggcgcaggagggtgagcgttattggtcggcagccttctgggcagaccttgacctcgtgggctagggatgactaaaatatttattttttttaagtatttaggtttttgtttgtttcctttgttcttacctgtatgtctccagtatccactttgcacagctctccggtctctctctctctacaaactcccacttgtcatgtgacaggtaaactatcttggtgaatttttttttcctagccctctcacatttatgaagcaagccccacttattccccattcttcctagttttctcctcccaggaactgggccaactcacctgagtcaccctacctgtgcctgaccctacttcttttgctcttagctgtctgctcagacagaacccctacatgaaacagaaacaaaaacactaaaaataaaaatggccatttgctttttcaccagatttgctaatttatcctgaaatttcagattcccagagcaaaataattttaaacaaaggttgagatgtaaaaggtgttaaattgatgttgctggactgtcatagaaattacacccaaagaggtatttatctttacttttaaacagtgagcctgaattttgttgctgttttgatttgtactgaaaaatggtaattgttgctaatcttcttatgcaatttccttttttgttattattacttatttttgacagtgttgaaaatgttcagaaggttgctctagattgagagaagagacaaacacctcccaggagacagttcaagaaagcttcaaactgcatgattcatgccaattagcaattgactgtcactgttccttgtcactggtagaccaaaataaaaccagctctactggtcttgtggaattgggagcttgggaatggatcctggaggatgcccaattagggcctagccttaatcaggtcctcagagaatttctaccatttcagagaggccttttggaatgtggcccctgaacaagaattggaagctgccctgcccatgggagctggttagaaatgcagaatcctaggctccaccccatccagttcatgagaatctatatttaacaagatctgcagggggtgtgtctgctcagtaatttgaggacaaccattccagactgcttccaattttctggaatacatgaaatatagatcagttataagtagcaggccaagtcaggcccttattttcaagaaactgaggaattttctttgtgtagctttgctctttggtagaaaaggctaggtacacagctctagacactgccacacagggtctgcaaggtctttggttcagctaagctaggaatgaaatcctgcttcagtgtatggaaataaatgtatcatagaaatgtaacttttgtaagacaaaggttttcctcttctattttgtaaactcaaaatatttgtacatagttatttatttattggagataatctagaacacaggcaaaatccttgcttatgacatcacttgtacaaaataaacaaataacaatgtgctctcgggttgtgtgtctgttcacttttcctccctcagtgccctcattttatgtcattaaatggggctcacaaaccatgcaaatgctatgagatgcatggagggctgccctgtaccccagcacttgtgttgtctggtgatggcaccatctctgattttcaaagctttttccagaggctattattttcactgtagaatgatttcatgctatctctgtgtgcacaaatatttattttctttctgtaaccataacaacttcatatatgaggacttgtgtctctgtgcttttaaatgcataaatgcattataggatcatttgttggaatgaattaaataaacccttcctggggcatctggcgaatcccagctg

SEQ ID NO: 67 - DNA, 4025 bp, Homo sapiens
  misc_feature: Incyte ID No: 330908.2
cggcatctgaggtttcctccaaggccctctgaagtgcagcccataatgaaggtcttggcggcaggagttgtgcccctgctgttggttctgcactggaaacatggggcggggagccccctccccatcacccctgtcaacgccacctgtgccatacgccacccatgtcacaacaacctcatgaaccagatcaggagccaactggcacagctcaatggcagtgccaatgccctctttattctctattacacagcccagggggagccgttccccaacaacctggacaagctatgtggccccaacgtgacggacttcccgcccttccacgccaacggcacggagaaggccaagctggtggagctgtaccgcatagtcgtgtaccttggcacctccctgggcaacatcacccgggaccagaagatcctcaaccccagtgccctcagcctccacagcaagctcaacgccaccgccgacatcctgcgaggcctccttagcaacgtgctgtgccgcctgtgcagcaagtaccacgtgggccatgtggacgtgacctacggccctgacacctcgggtaaggatgtcttccagaagaagaagctgggctgtcaactcctggggaagtataagcagatcatcgccgtgttggcccaggccttctagcaggaggtcttgaagtgtgctgtgaaccgagggatctcaggagttgggtccagatgtgggggcctgtccaagggtggctggggcccagggcatcgctaaacccaaatgggggctgctggcagaccccgagggtgcctggccagtccactccactctgggctgggctgtgatgaagctgagcagagtggaaacttccatagggagggagctagaagaaggtgccccttcctctgggagattgtggactggggagcgtgggctggacttctgcctctacttgtccctttggccccttgctcactttgtgcagtgaacaaactacacaagtcatctacaagagccctgaccacagggtgagacagcagggcccaggggagtggaccagcccccagcaaattatcaccatctgtgcctttgctgccccttaggttgggacttaggtgggccagaggggctaggatcccaaaggactccttgtcccctagaagtttgatgagtggaagatagagaggggcctctgggatggaaggctgtcttcttttgaggatgatcagagaacttgggcataggaacaatctggcagaagtttccagaaggaggtcacttggcattcaggctcttggggaggcagagaagccaccttcaggcctgggaaggaagacactgggaggaggagaggcctggaaagctttggtaggttcttcgttctcttccccgtgatcttccctgcagcctgggatggccagggtctgatggctggacctgcagcaggggtttgtggaggtgggtagggcaggggcaggttgctaagtcaggtgcagaggttctgagggacccaggctcttcctctgggtaaaggtctgtaagaaggggctggggtagctcagagtagcagctcacatctgaggccctgggaggccttgtgaggtcacacagaggtacttgagggggactggaggccgtctctggtccccagggcaagggaacagcagaacttagggtcagggtctcagggaaccctgagctccaagcgtgctgtgcgtctgacctggcatgatttctatttattatgatatcctatttatattaacttattggtgctttcagtggccaagttaattcccctttccctggtccctactcaacaaaatatgatgatggctcccgacacaagcgccagggccagggcttagcagggcctggtctggaagtcgacaatgttacaagtggaataagccttacgggtgaagctcagagaagggtcggatctgagagaatggggaggcctgagtgggagtggggggccttgctccacccccatcccctactgtgacttgctttagcgtgtcagggtccaggctgcaggggctgggccaatttgtggagaggccgggtgcctttctgtcttgcttccagggggctggttcacactgttcttgggcgccccagcattgtgttgtgaggcgcactgttcctggcagatattgtgccccctggagcagtgggcaagacagtccttgtggcccaccctgtccttgtttctgtgtccccatgctgcctctgaaatagcgccctggaacaaccctgcccctgcacccagcatgctccgacacagcagggaagctcctcctgtggcccggacacccatagacggtgcggggggcctggctgggccagaccccaggaaggtggggtagactggggggatcagctgcccattgctcccaagaggaggagagggaggctgcagacgcctgggactcagaccaggaagctgtgggccctcctgctccacccccatcccactcccacccatgtctgggctcccaggcagggaacccgatctcttcctttgtgctggggccaggcgagtggagaaacgccctccagtctgagagcaggggagggaaggaggcagcagagttggggcagctgctcagagcagtgttctgggcttcttctcaaaccctgagcgggctgccggcctccaagttcctccgacaagatgatggtactaattatggtacttttcactcactttgcacctttccctgtcgctctctaagcactttacctggatggcgcgtgggcagtgtgcaggcaggtcctgaggcctggggttggggtggagggtgcggcccggagttgtccatctgtccatcccaacagcaagacgaggatgtggctgttgagatgtgggccacactcacccttgtccaggatgcagggactgccttctccttcctgcttcatccggcttagcttggggctggctgcattcccccaggatgggcttcgagaaagacaaacttgtctggaaaccagagttgctgattccacccggggggcccggctgactcgcccatcacctcatctccctgtggacttgggagctctgtgccaggcccaccttgcggccctggctctgagtcgctctcccacccagcctggacttggccccatgggacccatcctcagtgctccctccagatcccgtccggcagcttggcgtccaccctgcacagcatcactgaatcacagagcctttgcgtgaaacagctctgccaggccgggagctgggtttctcttccctttttatctgctggtgtggaccacacctgggcctggccggaggaagagagagtttaccaagagagatgtctccgggcccttatttattatttaaacatttttttaaaaagcactgctagtttacttgtctctcctccccatcgtccccatcgtcctccttgtccctgacttggggcacttccaccctgacccagccagtccagctctgccttgccggctctccagagtagacatagtgtgtggggttggagctctggcacccggggaggtagcatttccctgcagatggtacagatgttcctgccttagagtcatctctagttccccacctcaatcccggcatccagccttcagtcccgcccacgtgctagctccgtgggcccaccgtgcggccttagaggtttccctccttcctttccactgaaaagcacatggccttgggtgacaaattcctctttgatgaatgtaccctgtggggattgaggtggggaactagagatgactctaaggcaggaacatctgtaccatctgcagggaaatgctacctccccacctcaatcccggcatccagccttcagtcccgcccacgtgctagctccgtgggcccaccgtgcggccttagaggtttccctccttcctttccactgaaaagcacatggccttgggtgacaaattcctctttgatgaatgtaccctgtggggatgtttcatactgacagattatttttatttattcaatgtcatatttaaaatatttattttttataccaaatgaatac

SEQ ID NO: 68 - DNA, 1628 bp, Homo sapiens
  misc_feature: Incyte ID No: g687589
  unsure 114: a, t, c, g, or other
agtcagcacgggggtgctggaagagatcgggaataatagcgcagaccaatgagcctagggagatgctttcatcgtctctccttccctcaagtgttctggaacctatcatttganttagccgagtcaggcaggagggggcggggaatccttccgcccttcttaggaggggctgcattgcagggggagagtgaactgacagactcagtcactgaagagggaaaaggagtgagaagacaaagccgtcaaagccccaacagctttgtatttctccagcccggccggcagaccccggagctcccgaggcactccctccatctttggaacgcgccagtaattgaattgataacaggaagctatgagggaccctgtgagtagccagtacagttcctttcttttctggaggatgcccatcccagaactggatctgtcggagctggaaggcctgggtctgtcagatacagccacctacaaggtcaaagacagcagcgttggcaaaatgatcgggcaagcaactgcagcagaccaggagaaaaaccctgaaggtgatggcctccttgagtacagcaccttcaacttctggagagctcccattgccagcatccactccttcgaactggacttgctctaaggccaagacttctctctcccatcaccttgccctcattgtcttccctctcaagccccttcctttccactcctttcccattttaatcttgttctctccctactgtgttggtggtgctgatgaatctgccagagttgagttctatgtatttatttatctatctgtctactccatttctctcaaaagccctcaagtcacaaagtaaatggttcaagcaatggagtactgggtcacagggattcctcctttcccccccaaatattaactccagaaactaggcctgactggggacaccctgagagtagtatagtagtgcaaaatggaagactgatttttgactctattataatcagcttcagagattccttaaaccttcctaatttcctgctccagggcagtgaaacacaaatatttcttcaaggggtgatgaaaacctcggaagttttaatttgaggttatctgctacgaaacagtatttctaaaaggctaaagtgataagtctcttgcttttttttgatcctgctcttatattcttttttttcctcagagaaatcaggagggtagttagaggtataaaacaggaggaaatattatggaaaatgaaaatagggaaaataattgaatcattttagaagtagctaatttcttttctcaaaagagtgtcccttcttcacacctactcactttacaactttgctcctaactgtgggttgaaaactctagctaaagaaagttatcaaatcttaacatgcattcctactattatgatagtttttaaggtttcaattcaatcttctgaacggcataagtcctattttagccttacctcctgcatttgcaatacgtaatactgatcagtgggcacagttcttcagctacattgagaccctgaaatgaacaattatattctgactcgacatcttgtccccaatccttccaaaaatattgatggtgatttgtgctaccatttactcgtttatttaataaagacattcaattccca

SEQ ID NO: 69 - DNA, 4395 bp, Homo sapiens
  misc_feature: Incyte ID No: 197975.11
ggcactggggttccaggacacctccgccccctccactttgagactcgtcgagggcgaggcccccagcagtgagactggcacatccctggacagcccctcagcctacccccagggccccttggtgcccggttccagcctgagcccggatcactacgagcacacgtcagtgggagcctatgggctgtactcggggccgccggggcaacagcagcgcacgcggaggcccaagctgcagcactcgacctccatcctgcgcaagcaggctgaggaggaggccatcaagcgctcacgctcactctccgagagctatgagctctcctcggacctgcaggacaagcaggtggagatgctagaacgaaagtatggggggcgcctggtaacccgccatgcggcccgcaccatccagacggcgtttcgccagtaccagatgaacaagaacttcgagcgcttgcgcagctccatgtcaagagaaccgcatgtcacgccggattgtgctgtccaacatgaggatgcagttctcctttgaggggcctgagaaagtgcacagctcctacttcgaggggaagcaggtctcagtgactaacgacggctcccagctgggagccctggtgtcccctgagtgtggtgacctcagcgagcccaccaccctcaagtctccggccccctccagtgactttgcggacgccatcaccgagctggaggacgccttctctaggcaagtgaaatcactggccgagtccatcgacgatgccctcaactgccgcagcctgcacactgaggaggcaccggccctggatgcggcgcgggcccgggacaccgaaccccagacagccctgcacggcatggaccaccgcaaactggacgagatgacggcctcgtacagtgatgtcaccctgtacatcgatgaggaggagctgtcgccccctctgcccctctcgcaggcaggggaccggccgtccagcaccgagtcggacctgcggctacgggctgggggcgcagccccagactactgggccctggcccacaaagaggacaaggctgacacggacacgagctgccggagcacgccgtcgctggagcggcaggagcagcggctgcgggtggagcatctgccgctgctcaccatcgagccacccagcgacagctctgtggaccttagtgaccgctcggagcgggggtcactcaagaggcagagtgcttacgagcgcagccttggcgggcagcagggcagtcccaagcatggtccccacagcggcgcccccaagagcctcccccgggaggagcctgagttgcggccccggccccccaggcccctggacagccacttggccatcaatggctcagccaaccggcagagcaagtctgagtcggactactcagacggtgacaatgacagcatcaacagcacgtccaactccaacgataccatcaactgcagctccgagtcatcgtcccgtgacagcctgcgggagcagacgctcagcaagcagacctaccacaaggaggcccgcaacagctgggactcgcctgcctttagcaacgatgtcatccgcaagaggcactaccgcatcggcctgaacctcttcaacaagaagcctgagaagggagtccagtacctcatcgagcgtggctttgtgcccgacacgcccgtcggggtggcccacttcctgctgcagcgcaagggcctcagccggcagatgatcggcgagttcctgggcaaccggcagaagcagttcaaccgtgacgtgctcgactgcgtcgtggacgagatggacttctctaccatggagctggatgaggccctcaggaaattccaggcgcacatccgtgtccaaggggaggctcagaaagtggagcggctcatagaggcgttcagccagcgctactgcatctgcaaccctggggtggtgcggcaattccggaacccagacaccattttcatcctggccttcgccatcatcctgctgaacaccgacatgtacagccccaatgtcaagcccgagcggaaaatgaagctagaggacttcatcaagaacctccgaggtgtggacgatggtgaggacattccccgtgagatgctgatggggatctatgaacggatccgtaagcgagagctaaagaccaatgaggaccatgtgtcccaggtgcagaaggtggagaagctcattgtggggaaaaagccgatcggatccctgcatcccgggctcggctgtgtgctctctctgccccaccgtcggttggtctgctactgccggctctttgaggttccagacccaaacaagccccagaaactcggactacaccagcgagaaatcttcctgttcaacgacctcctggtggtcaccaagatcttccagaagaagaagaactcggtgacgtacagcttccgacagtccttctccttgtacggcatgcaggtcctgctcttcgagaaccagtactaccccaatggcatccggctcacctcgtctgtccccggagcagatatcaaagtgttaataaacttcaacgcccccaaccctcaagaccggaagaaattcaccgatgacctgcgggagtccattgcggaagtccaagagatggagaagcacaggatagagtcggagctcgagaagcagaaaggcgtcgtgcggcccagcatgtcccagtgctctagcctcaaaaaggagtcgggcaacggaacactgagccgggcctgcctggacgacagctatgccagcggtgagggcctcaagcgcagcgccctcagcagctccctgcgggacctctcggaagccgggaagcgagggcgtcgcagcagtgcgggatcgctagagagcaatgtggaatttcagcctttcgagccactgcagccgtcagtgctgtgctcctaagccatgggacccgaggactgccccccggcgcctgcccaggcggaggccctttcagaaagggcgaagctcacgcctgactctgcgggccgcggggccgcgttcccagtggacagcgtggtgagccgtggccggacggcaggaggagaggggagccccctctggctgtgtgtcaccttggctggctggctggccagggttttgccgatttccctcctcacatccctcccaccctcggtcatatcattgagatcaccgtaccagcaaatctgcaaaccaagcactttgttaatctccagagagagcaaatacagcaatctagagtttagcctttttaaaaatgtgactttaacccgcccacctgtgtcctcccattggcgtggcatttctttggtgtctgctcagaaagaaacagcatgggaccgtgtgattgggtccaggctgggctgtcagggaagcgccctggtgtctccgactcatcaattctcgggttttttttaaaagccaggctccccaaagcactctttgtctcgcaattttgaggaggctgttccgacctggaagcgttaaactgctgcatgtcatctggcgtcagctgtgaggctgcgctctgcgtgtgtgcgttgcaaaatgtattggcgtgactgtaaacacatcgttgaagtaaagcgattacatattgagtatgtcagcttttctcaccctcttctgtgctgggaggagagtctaactgtaacctttaggttgttccagaaaagattcaggccgtttggcacagaattgctctttctgaagggtagcagtaatgaataggaacagacagaaaaccccaggaggggctttcaggaaactctccctctccatcgccatcctgcaagctccacagcctcgggctgccagcctgtggcactgtcctcggtgtgtcctggagctgtgctgggcagcagggcctcgcgtaaggaactgctggaacccactgagcccttcccggggtttcccgccgcactcagtgtgttccttcaggctagtgaggtttcattctgttttatttgcaagcttatcaaaagtttgtggaagatacattgttgggttccagaggctggagtcatgctgcccacatcttgtttgggaaagcaaaagctcccagtgagctggtgtccccgtgtgtctttcatgggactgtcccctttagagatcccacctgtcagagccacagcttcggggtcctgtcatcacatcccctgggaggggaggcaggaggaggccgagggccccaggatgtctgcctggtcccttctcactgtgaggacgcccttggcacacctttctcaagtcacacaaattattgcagttacatacagaattgctgacaggagcaggagacgctgagggaaacagctggcaatgtgacaaaagtcttttctgggacaacaatcaaatcatgtatttgtatttttttaagtttaccaatgaattgtacaacaatgtaaaaataaagttcatcctaatatgctgtgcacatctt

SEQ ID NO: 70 - DNA, 4024 bp, Homo sapiens
  misc_feature: Incyte ID No: 227928.2
tctgttttttgcagggagaggtgatatccagcctcagttggacagtgctctccaagatgtcaatgataagtatctcttattggaagaaacagaaaagcaggctgtccggaaggctttgattgaagaacgtggccgattctgtaccttcatctctatgctgcggccagtgattgaagaagaaatctcaatgctaggggaaataacccaccttcagaccatctcggaagatctaaaaagcctgaccatggaccctcacaaactgccctcctcaagtgaacaggtgattctggacttgaaaggttctgattacagctggtcgtatcagacgccaccctcttcccccagcaccaccatgtccagaaagtccagtgtctgcagcagcctgaacagtgtcaacagcagtgactcccggtccagcggctcccactcgcattcccccagctcacattaccgctaccgcagctccaacctggcccagcaggctcctgtgaggctgtccagcgtgtcctcccatgactcaggattcatatcccaggatgccttccagtccaagtcaccatcccccatgccgccagaggcccccaaccagttgtctaacgggttttctcactatagtttatcaagtgagtcccacgtggggcccacgggtgcaggccttttccctcattgcctgcctgcctcccgcctgctccctcgggtcacctctgtccaccttccagactacgctcattattacaccattgggcccggcatgttcccgtcatctcagatccctagctggaaggactgggctaagcctgggccctatgaccagcctctggtgaacaccctgcagcgccgcaaagagaagcgagaaccggaccccaacgggggaggacccactaccgccagcggcccacctgcagcagctgaggaggctcagagaccacggagcatgactgtatcggctgccaccaggcctggtgaggagatggaggcttgtgaggagctggccctggccctgtctcggggcctgcagctggacacccagaggagcagccgggactcgcttcagtgctccagcggctacagcacccagacaaccaccccctgctgctctgaggacaccatcccttcccaagtttcagattatgattatttctctgtaagtggtgaccaggaggcagatcagcaggagttcgacaagtcctccaccattccaagaaacagcgacatcagccagtcctaccgacggatgttccaagccaagcgtccagcctcaactgctggcctccccaccaccctgggacctgctatggtcactccaggggttgcaactatccgacggaccccttccaccaagccttctgtccgccggggaaccattggagctggtcccatccccatcaagacacccgtgatccctgtcaagaccccaaccgtcccagacctcccaggggtgttgccagcccctccagatgggccagaagagcggggggagcacagccctgagtcgccatctgtgggtgagggcccccaaggtgtcaccagcatgccctcctcaatgtggagcggccaagcttccgttaaccctccacttccaggcccgaagcccagtatccctgaggagcacagacaggcaattccagaaagtgaagctgaagaccaggaacgggaacccccaagtgccactgtctccccaggccagattccagagagtgaccctgcagacctgagcccaagggatactccacaaggagaagacatgctgaacgccatccgaaggggcgtgaaactgaagaagaccacgacaaacgatcgctcagcccctcgcttttcttaggttcacaagaaatgcgccggtggggaatgaactgtttcattaataaaacctaatttgtcttgatccattccactctataataaaacaaaagattttgtaggcaactcggaatatagctcttttgaaagtactcgacacctttagataagaattaaaaccaacctatgtaactgacataatcttgatcttttaatttgtaaatattgacaattttctttctgcacattttaatcttagtttcccttttgatttttctgaaggtgccaaattccatttaacttttttacaagtctttgtaaaattttaaatgcataaagggggttggggcaggggaaccacgaagtagttaattttagaaaaggatttactatacttcactcttctttttttttccccacaagcttttgtagatgcattgtagtagtctagcttagaagcaaatgcaagttattttaatgtacaaactaaatgggtaagaggtaaaatcttcatttaaatatactatgttctggatgaaaagagcaggagtaacaattgatgagcaatattcagagtgaagtaaatctggaaatggtagactgtgttgggattggggggagggccatgggaggggtacatcgtcaacatagccgatcctgttacatttaagagtagcctcgtaggttgaatttcttctggtagcttcatggtaaatgcatccgaataagccatactggattgcagtgtttgtttctgtagggtgtttaaggacttgacttcctttctcccatgattcctctggactgcacacagcacccacaaccagccccatgcatgctgctgcctctgggcagtcgtagaatctcccacttcagtttctcgttgattgtactcacctttatggaatccaaatacatccaaaagggtaaggcagttttaaaaatgtgaaaacatttaaaaatgataatagcagggaattcttagattatagtaaatgccttttacttaactgtgcccagcaggctgggtgcgttaaaaagcccaagtattttgaaaaaactcgaacagatttgacaagggtagccagcttggagtctagcaacttgccaatgtgtttaccaatctgggggcttgtttttcttttcttctttcaaataaatggcagttaactggctttacagtaaacattgaagagaggaggatttgtttattgtcactgggaatctgaccactatactgtcctttttttgtattctgggtaaatgttttttggaaaagatttgtcttttctaagtggaagttaaatttgttatactgcccatcccctaaagccaacagagatttgtagatttaaagggatcacatttgaagacaatagtgtttaagaaagcaagcaagtcccttagcagtcaggtcataacagggcacatttctgaccgaaccctctcaaggcagaggaggagtttggtgggtttcatacaccctgcagattcctgttggctctaaccctcaattacctaatcttatgctttaacacataactgcattggatgtgagagtaacgtaccgtatggtcattgttctatatattaacattgaacactgctgcgattgctcaaggacattttatgttacggctttaaagcaaaggcatgattattagaaactatttaagcttttttctttgaaaaacaagctccttttacagaatataaacaacagtagtgcctgtggtttagcccaccaatcttgatgactaaaagtagctgatgcattgtgcatatgatgcttgagatggtttttgcaaaagcagaaatcgctgcaaggtaatcacaatagataaaagtggtattttaaacctttgaaataaatggatgtaactgtaccttggtacagcttttcacttgtttagtttttaaacgttagtataatctgaataaataaaatgttgccaaattcaatgtagaaagaatgtgacaacacaccttgggtagttctgcttgtgtttttgcatattgtaaaagcagtgtcacagctaaaaagaaagaaatcgtttctaacagtaaattattgtgctttagttgctagtttgtactgagagttgacctctccctgtgcagttttttgttctaaacttgtataaataacaattgtgtaatgtgtctccctcctacattgtaacaattgcttcagcctacgttataaataaagaaccactagatt

SEQ ID NO: 71 - DNA, 3733 bp, Homo sapiens
  misc_feature: Incyte ID No: 258785.7
  unsure 1042, 3012-3106, 3193, 3593: a, t, c, g, or other
gagaagaggaggaagagatgtcagtgtgacagaagggagagttagacctccagacgtcagcctccctcccatggggtacattttcaatctgagtgttgttgccttagctgtgttggtattagcttgattggttggtccgctggttataaggtgtagggaggcagtttttgtttagtttttaggactttgcctcttcctttgtccttagcataatttctaggcagagcatccacgaagtcggttttcattgccagctcaagagcgacaatcatttacgagttcctatgttatgttaggtgccttatgtatattatcccaaatccactgcatggtttaaatacaggcactggaatataaatgaaaaaggtcattacagtcactgactttctgcaggaccttaaacatttctctttccacaagtttccccttaatcatgtgtcaaacctctcttcctgacgggaatgttgtgctataatgaatctgcataacgcttgggattctaggaggaaggaaggttccatggacatgtaagtacagcatattcccctcagtcttctaggagggcagagtgaatcccagaactggtaagattgggaatctgagcattgccactttaatcttagaatatttatcattttgacacatcctgttttttagagaggaaaacaaacacagtttctgcattggtagtgtaaagcataccttgttaggaacgtgttttgtaagacacatttgggttgtcattctagagcatgtcaaactttgtacttcaaaatatatttagtatgattgttagtggtaacatatatcaaggctttgaattaactgttttatttaattttcacaagaagcacttattttagccataggaaaaccaatctgagctacaaatagttctttaaaataagcccaggttatttagctattctagaaagtgccgacttctttcaagaagcaggcattgtaggacagctgagaattatcacatagcctaaattctagcctggcagcaagagtcacatctgagatgtccaaaaaaaanaaaaaaaaacacctgatctacattgaaagggggtagactaacgtatgtgagaccattttcctatttgcagttacaaggttaaagaactttgaaggtcattcggctgctaagaggcatgtcgaacactctgtgtggctctttcacagtaaaccctcctaagagcagaagacacatggctgttagtgtctgcgtttagatttaatttctcaaataaaggcccttggctgcgtatcatttcatccagttataaactagggctcctgcaagcacccccattctaagggtgaattattgaaatcagttgctatttgatgagtcacaactggcccagcaggcagggcatttgaagtcatggtcatcaaaaagaaatgattgttttttgaaaagctaaatgcttaaaatgcttctagagggaagtcgtggggcgtgtgctcattctctttaaaatcagggttgttgagtttgtttttaaacatttttataagttcatgagaaaaaatatataaattctaagaaccaacactgtattcccagaaacatgaccctcgctggtcttgggtccacatatcattggactctgggggacacaaagatgcctgtgacactttggtgttgccgagttagtcaacaattattctgggaaaaagcagaattgaattcttctctagatgtcctaccagggttggccaagggccacaaagcaggctaataaattcccacaggatccagacaccaggcaaaattgctctaagaagccagttactgtcatccctctatggttctagaaaaaatagtacaaaaatgacaggtcatcctatgagcgtcatgccaatgaaaccccatcttctggagaagcccttgaatcagaattatcttttttcttgatgtcgtcagatgcagccagtttcttaatttttttaaaaactgtatgtttctgtggtatgtatatttgtacacctaactacctggcacttggaaatcacagcactactcagaggcaattgaataaagagaaatttaattttaaatatcaagtcctgtcaaacatttctcaaacttctgattttatcaaaggtttgccagccaataaagtgcatcccaagtatacaggggagaaagctagactcctacagggtcctagagtttaagtaatttttttgttattaatataggtaataatttttctaatttttattttttggttccaaatgtaaagctccttgtgtttacctctgtttatgtcattcttgacatgtttatctaaattatgtgtgctctgtgacaggtgaaatgtaaatctgggatccatagtcaagatatcataaggacctacttcccagcctacctttcttcctctacctgataatgataatactcaaaataacaacattcaaaggaaacacaaagaaatcctgctttcacatctcctatttcttgggctccttaataactactgatggtttgttcatgaaaaaaaatttttaaatcaaaagattgtacttggccctgagttgaaaaaatttcaaaaatcaaaagtttgtacttggccctgagttgaaaaaaaaaattcacattctaagaataaacagaaaaatgttcttcttggaagtaaataacaaaagccatagtgttttcatttgtcttttcttcaggatacacggtagaagtcagagaatctttgatacttttatttggtgcaataatcaaggccatgcaacaacccaaaatcaagcattttggttcaagtcaggatgacatgagtggggacagaagctgtggcagtcattcaaataatctcatgggtcctgaggaaaagacaggagttaacgtattaagtttctactatatgcaggaactgtgttaaatattttacataagttttgataatagctaacattagctgagcacaaaatttgggccctgatttgtgctgagtatctttcacagattactgcttttaatcagcagtnnnnnnnnnnnnnnnnnnnnnnnnnnnnnnnnnnnnnnnnnnnnnnnnnnnnnnnnnnnnnnnnnnnnnnnnnnnnnnnnnnnnnnnnnnnnnnngatgttaagtaatggcccctggattcagtctgcagcctgaattcttaaccaattatactgtgatttcattattcttcagaattacantaaaaagaaggtattattccccattttacagatgaggtatctaagctcagagaagctaaacaacttgtgcaacaatcactaagcttataagcagtggattagggttagatttagatatttgtctggcatccaaacctgtgctctccctacagtaccacatggtttccacagtctcatcagaccccggaatttcactccctgagactgcttaattgtgaatttcccaaactgattcaccaagagcctactgtctctgctttgtagatagctttgaccacattcaatgacattaggaaagactccatttcccaagatggctcagaaaatcagatgctatgacgcatgttgaaagtgaaaacccatctctgagaaagaagcatctgttttattagtaaaaaanaaaaaatgaaatttacagcaatgttgtgtgacttctcaaaattctttcattttcttatttcagaatgaatagtgttgttcgttggctgggaatggggaagaatgtgatttttaaaaataaagcataatcaaactctgcat

SEQ ID NO: 72 - DNA, 7325 bp, Homo sapiens
  misc_feature: Incyte ID No: 977757.3
  unsure 4103, 4411, 4430: a, t, c, g, or other
cggacgcgtgggctgctgcggagccggcagcgcaggcgggcggagcggagctgcccccgtggtggcgggcgatgcccccgtgagcctccctcgccgcccctccccgccccgcgtgcctatccactcggagtccgcgccagcctggggccgggccgcgcctactgccgggttcgcggggcggggtcccggggcagcacctgccccgccttgcggagccgcctcggcctgtggaggccccctccctgtctggaccccggccccacctccggacccttttatcacatcgcctcctctgggagcctgccctgattgccttcacctcatttcttgaaaattggtgttttggcagaagtcaattgaagccttgtgcaaatgccctaggggtgtgctgttgggaggcagccccctgtgatgcggaacaccaggctcagattcatcagttcgagctgcctgaggccctgccaccccggggaccatgtttaacggggagccaggtcctgcctcatctggggcctccaggaatgtggtgcggagctccagcattggcggtgaaatctgcggatcccagcaagccgggggcggggctgggaccaccaccgccaagaagcggcggagcagcctgggtgccaagatggtggccatcgtgggcctgactcagtggagcaagagcacactccagcttccgcagcctgaaggggccaccaagaagctgcgcagcaacatccgccggagcacggagacaggcatcgcggtggagatgcggagccgggtcacacgccagggcagccgggagtccaccgatgggagcaccaacagcaacagctccgacggcacgttcatcttccccactacccggctaggggctgaaagccagttcagcgatttcctggatgggctgggaccagctcagattgtggggcgacagacactggcaacaccacccatgggagatgtgcacattgccatcatggaccggagtggccagctggaggtggaagtgattgaagctcggggcctgacccccaaaccaggctccaaatccctcccagccacctatatcaaggtttacctgctggagaatggggcctgcttggccaagaagaagacaaagatgaccaagaagacctgtgatcccctgtaccagcaggctctgctctttgacgagggaccccagggcaaggtgctgcaggtgatcgtctggggagactatggccgcatggaccacaagtgcttcatgggcatggcccagatcatgctggacgagctggacctcagcgccgcggtcaccggctggtacaaactcttccccacctcctcagtggcagactccacactcggatccctcaccaggcgcctgtcccagtcttccctggagagtgccaccagcccctcatgctcttaaggatgtcaggaagaggccaggatggtggtgtggggaggggtgcctgctggccccatgtcctcccctgtacatagtcttcgtgtctttctggaccccttgtcctgctgcatgcctgttggctactgggctcatcccagctggcagtggagactgtagtgtgtgcgtgtgtgcgtgcgtgtgtgtgtgtgtgtacgtgaccacgttctatctgttcatttgtctgggtatagtcactcctggtgatgatatgggctgaaatgtctccacgtctctttgtgtcttgttgaaaagaaacccaaaggagtgttgtgtggacatgactcaccctgaggagtctccagggatggaggtggggcatgcggccactggtcggtgctgcctggtcctggcctggggcagagcctgtgtgttcttcacctgtgcctgctcctggtggtctctgctttgttttctgtcttgtcttttggttcccctcttgactctcccggctctgccactgttttctgagaaatgtagcatccgctgcagctggccacactgagggccctctgggaaccccaccccactggagccgctccggcagctcttcctgccactgaatgcgttctgcagcatgtagcatgcccacctagctccctggccagggccctggggaggcagagggtacccaggggactgagggcttagaaatgactttctctatgaggctggaacctcctccttcttccagtgaagcacgaggtcttggttccagggttcctggccaggtgcccccttagcatttgttcttcatctcctgtctcttcaagcctccccactccaccgtgccgaaggagctctgccagtgggcctgggcaggcagccacagagggcatgttatctgctaaagcaaacagtcctcctgaggccctgagggtggccctgaccccctcagggctcattcctggtgggcatgactcggtaaggaggttctgtgggtagggctgtttgctggaataaggagggctgaggctgagttgttccccgccactgttgaggatcccatctgacatttggggattcactgcatgaagttgttcatttggggctccagtttttgtgcatttccagaccagggtccctgtctgggagctcagacttagctgggctccagcagcctggctccggactctcgtctgccaccatcaccagctctgtctaagcaatacttacccctccgggcttccctgctttcctgtgccccactgctgccctctgcagagccatctgctccaggcacccacctgcctctgcttgctttctcacccatgtctggttggagcttctcacagccactcaaaccctgacttgatttgacaactgggccctgttggtggagaccagtgcctgaactggaccctgtgaaatctgtcccgtgggaatcctgaagtctgactcaggaatgcccagacctgtccctgtccctcctcagctctagggtgaaaggcgagaggttgcacaggacatggacagagcagcccttgggtttgtatctggtaggggagaaagcagcaggacagtggaggtgtgtggaaggcactctttccacctctctccaggcattatccccaggtgctgaaatggctgtggccccagcacctgaggcaggggtacgctacctggggtagcagtagaaaggtcttggggtctgaatgacttggggcctccattcataaccaaagttgtaggggcatggaggcagtggcgccttatggataggtcatctcagcccaaagggcctccttggctggcatggttctgtgttacgttgaagccagagtcttataacacctcccaagaaagataggggaagaagccagaaccccacctggcctgcccacaggacaagaagtgggtaagggcaggaaggaaatgaacggagttagctcccaggctcctatctctgcctgagcctctattcttatattatcagagaaagggaccattgggtgcatagagatggggaggaggccactgggctgaattttctctttaggcggaaatgctctccccaggcccattgcgttcgtcaagttcttggaaatggacaaagggctctgtcctcctcgaccctagtgggggatcaagaaggaaactccgttgcaaaagggtattttaatctcctgtttatgatatattcacctctagagcagtcactgtcagggtgttgcgaaaatactctacacctttgggatgatagggttgttagtgacccacaggacagtatagatgtttgtggatgtagcactgagtggtgatacccagaccagcagtcaccccaggaagtgggggctacccataccctcattcctctggtggggagctgcctgcagagaggcctgccactgggggttccaggccgtggtgacccttgcctctggggaagggttagcacaggggaggttctagctggaggaggggtctgatgtgctggtaacttgggctgacctacctacagtccctggctgccaaaactgctcagcagttgggccactccactattccacctctctaaaagaaggtaatttcctccccaaattgaccttggggaattattcttttaaccctttgcaccaaataagttactcatccccacctggattttaccccatgagggtaaagttgtgtgaggctgacacgtctgtgtgatgcagtgtggctncacttaagggtctgtttctcagcatcatggatgcaggagcttgtctgaaaagccactctggacctagcctgtcccagaagaggagaatgcacaagtgtaactcctggttgtttgctggggtgggggagcatctgctgtttgaggacggggggtggggaaggaaggaacatgatccctccagaagtctcccaccctggggccaactcactgccatgttcagtgtcccggctccaaatgcccccttgcccagatgaaaccctgcagtggttacaggaatggagctctttgtcattccacctcctctggtncaggcgaggttcactgtgncatatggcagagacaggagtggccctgcagtgatgttgggttgtgggcagggacagtgatggatgactcagagcgtctgtctttgtatttctgctctgttcattctgtcccactttcttcatagactccttttccctgcaatgggtttttggtatgaaaaaggctccagtaaatggagccaagtcttggtttgacaaggggaacttgatccttcagggaagaatcatctccaaaatgactccccatctggtttcttctaccacccaattctactaggaaaggagcacttaggaggctcttgggatgcagcaagtcccaggcaatgccagcatttcatgggggctgaggcagaacccaggagctccaagaaaggccacccatagagctcatcctctgtggaatcactgccggttagaacactgaggtcaagccagtcctcccatggtcatgccacccaccagggaagcatgcctgatctcttctttactgccagccttgaggagagcagaagcctccatttttaaagacaataaagacctccaagggtacttctttggaaatgaaatgtagcacaatcttagcctacgttaccaggagccctgacatgcaaccagggtccctcttccatgccctgctgcccaggagttgctgagctcctcttcccctggggttccagccctcctaatacctcatattccccatcttcctcagcccagaaagcaatggggctttagtgatgctcctcttttgtgtctctctggttgcctctagcactgtgcaaactctgcaagaaattgctgcctttgcttgatgttgtagatgagttgccctccacctggctggagagatggcacatcattcagggccagaaggttgtccagcagtgtttctgcagtggctgcagggagatggaaaagaagagccctgcttccctgcctcctcctacctttctcttccactcctcagagttttcttctccagtatcctgacatgtaaagagattctttaaaatgctgcttcttctactggactgtctttcactgagtagtcagggaggagatgaaaatgtggacacatccccccgccttctccctcaaccttttcactcacgtcagaagaggttggggcaaaacaaaacaagcatgattgaagagcaggggaagcccacacaatcaggtgagccctgatgggggctggactggcctggtctggctgggaaaggattcttttaaaagcgtgcctgagcatctcagagcaatgtcagtgatgccaaagagagcaacttggcctccttgggcaccaactctgatggctgagttgcacaaacgtggctcagatgttggcatgcccgatggtgggaccttgttctctgataaagggcttaatctttccatgtagcaaagcaactttccctccctcccctccccccgaaccctgagcttgggcttgtgtgggcccagcatggctgtgcctgtgagggaagccacatcagtgagagaaagttgcattctctcaggggcctagattggcttggggcaggtgcttgttgaaaagcatgagtgtttctgctttgggaaacccttccagggctctggttggaaacttggccagtaaggacagggccttgggcctcccaaggagttcacaatgatgccaggaagggtccctgagcctgggttccagtcagcttggctaacagaatggggcttgggaattccaggggcaactgagcatccaccccattagccagtgatctggacagggacagctggctacagggaatcaaaggctgttctgtacagttttaccagaaactgtgaccttgggtaaggctcctcacttgttctgggccatcaacttcctcatctgcacaaatcagagcattagctgctctccccatgattccctcccagttttaattaaaagtctctgatctggagcacatgagggttgcgagcctggtgcacctggttcctgtctccgtgggctggtttccttcagcccctgatgcccaggctgggtgcaggctctcatctggtccatgcccagatgctgcctcagacaagaactctgggaatcctaacagactctgctttcctctcttcgtggtttgtcctccctcttttattcttgtgtaatgatgagacataattaagggtcatctacaatggacaattttcaaggtgctgatgtgatgtcacaacctccgctacatcctgagtaagtcagtgtccccaacagcagatgaggctgggtctttcctcatttctgcttctgggatgacatcagtgggagagttgaagatctgagaattctaaaggaaatgttctctgatgggaggagagagggaacttatttcccttcaaagtagtttgcttcttaagaccactcctccctccagaatgtctttaaccagacatcatttcagaaggtggggcagctgcttccttaggaagagtgggcctgatagctcaaccaactcctttagcatgtaaactcacagaaggcaagaacccctttttttagactttccaaatgcatcctgcaaagagagagatagctgatagggactgacaagcacactgtttagataagaagcaattagccttttatatctgtgctctatacattttctatgtgcagcatctttcctaacttgttgtggttcccgggtggcaggtgcacagctgggagggactgccggctgtttcgtacaacattcttgccaattcccttgaggagaaaattcttcacatggcttctgcatgtacagtatttgggcagcaaaacatgattaaagtcagtttgaaaatggtttcatgtgttgctttctgtagatggttcttcattctagaaggaagaaaacagggttccaggtggctacaaagaggagga

SEQ ID NO: 73 - DNA, 2979 bp, Homo sapiens
  misc_feature: Incyte ID No: 232773.2
  unsure 1465-1497: a, t, c, g, or other
gcataagccaccatgtccaactgaaattcttaataattaataatttttgagcaagaggtccacactttcattttgcactgggttcccaaacaggtcctgggtaggaaggatggctgaggataaaacaggagttgctttggcctggctgaacatttgaaccaatgatcagagtttcattttatgattgtgttactctgaacagatttgctatttttttccagctacatttagagttcctcatgtatatatcacccctctttttccagtccatctaacctctcctttttttttggtgcctagaatcagttctccttgccttcaaaatccctgataagtgtccatttctttttgtatccttggatgtagaagccacaagaatggctttagcagcttattttaatcttatgaattattcattcaggattttttaaatgattcagatgctttcaatctgttaacagtatttataaaacatgtttcagtgatacaacataggtgaactaaaccaaagatgcaaatgccttggaggaaaagaaattgtattatagagaatcctgagatatatccttttgggttgtttaatttaaagcctatcacaaaacaaagagaattgtcgcactttaattccaacctcctgcagtacttcacaacccttagcataagattctgaaatttgtaataggtggtacctagtttgatgcagggttttgcagcagttgtgcgaatgcctctgcgcaacggcctttcagtcagactaaatgagaaaatccaaactgtcctatcaaaactgacccacaataactgtactctgaggcgaaacagagcaaatgtgggtttcctgttttcattgtaaaacattccaggttctcagattgaagagctacattcagctgatagttgacatctgttccctcacacgtagtggctctcaacacgggctgcactttggaatcacctgaggacctttcggaatcttcggttgaatcatcctggctgtcctggtgatgcttcttatgtgcagctaggctggagaaccactacagggctgacacctggaatgggagcttgtaacttttacaaaataatagatgtttatcatcttttgcaatttttacttttaagtctatactaaaatgagccaaagaagtcttaacaatgatgtatggcacaattggttggttgaggctatcattccatgattacaaataggtggttatgtggggtggttttgcacttgtggcaattggactgcaatttggccttaaaatgacacaattcctcgttctcagatggagaggaattgccttgaaatttgcatgtaccagactaagtgccagtatatatatgactgatattttcgtgactcatagaaggtgtccatggtatagagtttatgcctacatctctatctttattttgggcacacatgagcttttgttaattatttctttgtacttgttagaannnnnnnnnnnnnnnnnnnnnnnnnnnnnnnnngatttgtggtggattcaccttcttaaaataataaatttagaggatattaggaatgacattcaaaacaaatatagtgagaggtgattttttaaaaatttttgttcctggtttccaaattatgtttactttgatttgattatatgttggtatctcccaaatataggttaacttagctatttaaatggtatcttttgacatttaaaaagaattaagtacctgtcaaatcttgcattgaggttgcagttgaataagataaaagcttaggatgtcaaaaaataatatagagaaatattataagattttatgattattcttgaagtttttgatgcaaaaggaaaatatgctgaatagttcttccaaaaaatattatttccctcaatattttatttgtagccatgtaatttaaagagaacagaaaataactgcaatcaaaagtatggtttaatatcaatcaaagtggcacaacagaattgataagatctttataacaatcaattggctgatattaaaatattgattttaattgatcttttcaattaaaatctttagggcctgtaactcataaaatcagcatccaccacaatatatggtcattattggtttgtaagcatagatcaccattgactcctacctggagagacatgtctatttctaaaaatccagtagtttctttgcattctcagtagtacacgttgtatatatatatatgtaacaaatttggtagttttcagtatgtgtgatgtcctttgggggttatttatcttgctggtccataggaggggtacactaccccaagaatcaagacatctgagttctagttctagttctagctctgccactgaagagccaccttacctggggcaagttagccattgtctcccagtcatgtttaccacccatgaaaggactcgtcggtttgatgtttccattaagctcaatgagtaactctaatagttactcttgaatctggattgaaaaacaccatgcatctgatgagataattcataaatgttgccccttttttaaatgatacaaccctaaaagtgactgaattgcccaagtgcttgaacatggcagaggtagttactcctattttgcagtttgtgcacttaaaaattcctacagtgattgttactttactggggaaaaaagatgaggtgaaacttcctcccaaggaattaaaatatctgtagaagccatggcttgcttttataatgtggaaatcatttgatttgctgtaattcacgcagatccctccttttgtcagggggaaatgatttgcatcatgttcttttttcataatgcttttacttcctgtttggatcagttgtatgtaaatgtacatttttgttactttggctgtgcccgttagaatttatcttccataaagtatttctcccattgagtctaatgatgtatactttgcctaggtctttccaaaattaaatttatgtaaatgtctattttatataaaatatgatt

SEQ ID NO: 74 - DNA, 4408 bp, Homo sapiens
  misc_feature: Incyte ID No: g6634024
gggcgcggaggcgaccgccatggcgttcctcaaactccgtgaccagccatcactggtgcaagctatatttaacggagatcctgatgaagttcgagcactaatatttaagaaagaagatgttaactttcaggacaatgaaaagcgaaccccattgcacgccgcagcttaccttggagatgcagaaatcattgaacttcttattttatctggagctagagttaatgccaaagacagcaaatggttgacacctttacacagagcagttgcatcttgtagtgaggaagcagttcaggtacttttgaagcattctgcagatgttaatgctcgagacaaaaattggcaaacccctttacatatagctgctgctaataaagctgtaaagtgtgctgaagctttggtacctcttctgagtaatgtaaacgtatctgatcgagcagggaggactgcattacatcatgcagctttcagtggacatggtgagatggtcaaactactcttgtctagaggtgccaatattaatgcttttgacaagaaagataggcgtgctatccattgggcagcatatatgggtcacattgaagtagtgaaattgcttgtgtcgcatggagctgaagtgacatgcaaggataaaaagtcttatacacctcttcatgcagcagcctctagtggaatgatcagcgtagtcaagtaccttctagatcttggagttgatatgaatgaaccaaatgcctatggaaatacacctcttcatgtagcctgctataatggacaagatgttgtagtgaatgaacttatagactgtggtgctattgtgaatcaaaagaatgaaaaaggatttactcctttgcactttgctgctgcatcaacacatggagcattgtgtttagagcttctagttggcaatggggccgatgtcaatatgaagagtaaagatgggaaaaccccactacacatgactgctctccacggtagattctcccgatcacaaaccattatccagagtggagctgtaatcgactgtgaggataagaatggaaatacccctttgcacatagcagcacggtatggccatgagctgctgatcaacactcttattacaagtggtgctgacactgcaaagcgtggcatacatggaatgttccccctccatttggcagccttaagcggcttttcagattgctgcagaaaacttctttcttcaggatttgatatagataccccagatgattttggcaggacttgtctacatgcagctgcagctggagggaatttggagtgcctaaaccttctgctgaatactggtgcagactttaataaaaaggacaaatttgggagatctccactgcactacgctgctgccaactgcaattaccagtgcctgtttgctcttgtgggatcaggagcaagtgtgaatgaccttgatgaaagaggctgcacacccctgcactatgcagctacatcagacacagatggcaagtgcctggaatacttattaagaaacgatgcaaatccagggatccgtgataagcaaggatacaacgcagttcattattcagctgcttatggtcaccgtctatgtcttcagctgattgcaagtgaaactcctctagatgttttaatggaaacctcaggaacagacatgctgagtgattcagataatagagcaacaataagccctttacacttggctgcctatcatggtcaccatcaagcactggaagtgttggtacagtctttgttagatcttgatgtcagaaatagtagtggaagaacacccctagatcttgcagcttttaagggccatgttgaatgtgtggatgtactcattaatcagggagcctcaatcttagtaaaagattacattttgaagaggacacctattcatgcagcagcaacaaatggtcattcagaatgcttacggctattaataggaaatgcagaaccacagaatgcagtggatattcaagatggaaatggacagacgcctctgatgctatctgttctcaacgggcacacagactgtgtttactcattgctgaacaaaggagcaaatgtagatgccaaagataagtggggaaggacagcgttgcatagaggggcagttacaggccatgaagaatgtgtagatgcattacttcaacatggtgctaagtgcttacttcgggatagcaggggccggacgcctatacacctgtctgctgcctgtggacacattggtgttcttggagcccttttgcagtcagcagcatctatggatgcaaatccagccacagcagacaatcatggatatacggcacttcactgggcttgctacaatggtcacgagacatgtgtagaactgcttttagaacaggaagttttccagaaaacggaaggaaatgcttttagtccattgcattgtgccgtgataaatgacaacgaaggtgctgctgagatgttaattgatacattaggtgccagcattgtgaacgccacagattcaaaaggaagaactcctctccatgcagccgccttcacagaccatgtagagtgtttacagctgctgctcagccataatgctcaagtcaattctgtggactctacagggaaaacacctcttatgatggctgcagaaaatggacaaacaaatacagttgagatgctggttagcagtgctagtgcagaactgactttacaagataacagtaaaaatactgccctccatttggcttgtagcaagggtcatgaaactagtgccttgttaatactggaaaagataacagatagaaacctcatcaatgcaaccaacgcagccttgcaaacacctctgcatgttgctgcccgaaatgggctaacaatggtggttcaggaacttttgggaaaaggagcaagtgtgcttgcagtagatgaaaatggctataccccagctttggcctgtgctcccaataaggatgtggctgattgcctggctctcattttggccaccatgatgcctgtctcatcaagtagtcctttatcatccttaacattcaatgccattaaccgttataccaacacctcaaaaacagtcagctttgaagctttgcccatcatgaggaatgaacctagctcctattgcagtttcaataacattggaggggaacaggagtacttatacactgacgtggatgagctcaacgactccgattctgagacctactgagaggctgaggaggagggagttctcacagtaaagcttcaaactgtgctttttcaggaaaaaggcactttgatattcacgtagaaattcaacctaagaggaaagatcccacagtgagccaatgttaagagatctgatggcattaggaggaagagttttaaaggaattctcttctgaattccctgagggaattttctagaatctcagaattgaaagagacctgaggttcatccagtctctaacctcttaacaaatgcaggagtcccttctacaagggtgatctttccaccttgaacacttccaagtgactctacctcaccaagcagtccattcagttgttgagcagctctaactgttagaaaggtcttccttagatggagttgaagcctccctcccggtaacttctgtctttgggcctgggtctgtcctccaagagaaccctgagaatgttggaaggatgaatctcgcacattctgccatgtcttctcttttacaggctgtttgacttctctgctgaagtgatttccagaaggactcatttgacacactattagatttaccacatctaatgaaatccaaggtgtagctataaagtgacaagctgtttttaatttatcacatacaccagaacttctatcctgcatcacttatatgtaaatgatgctgttaccaaaaacattaaggtagttcttgcgaatgccaccccactaagaaaactatttcattacttttgtaatccatctgtgagagtctgccccccagcttaaccacttcctttgatctgcacccaatgaagggaaaccccaaagtactgtctcaaatggtatttgaactacgccagtattgttggaataagtacattaattacttgaatgaatgaacacagcaccgtagaaatttcctttatggttacaccttgtatgtctaaagcattcaggccctgttctgtagtgtttcttatcctcacacagagtagaaaagcctgtttgctttatttaacttatacataaaagatgacatctgaaatatctgatgtgtattataataccagcttctgctctagaactactttgggtgaaatggtggtaatagcaaatgacctcctttaacaagacactcatctcaaacaatgccatttagttcaggagatctctaagtgtagctgtaaattttggggttaatttggcttatattggaccttttaaaagaaataaagttttttaatgcaat

SEQ ID NO: 75 - DNA, 5007 bp, Homo sapiens
  misc_feature: Incyte ID No: g4589571
ggggcgcccgcgggccggagccggggcgggggccggggcctaggcgcgcggacctgcgagcggacccgagaggcggcggcggcgcagcggaacggcagagcgggccggaggcggccgaggcgcccggcgcaggcacccgtgcctcccctctgccaggaaccttggggccttgtgtgtgaccaggacctggtggcccccgggcggtggcagagcccctgtcccaagctgcttcctgccggcacctctgatcaagtgcctagagggatgtgtgtgccagccctcggtccagtgcccgctcctgagctgactcctgctgggccccgacagcttgccgtgtttcctgtgcctgtagctccctggttggatagctgccgcccgggagaggtgacccgggcgccctgctagggtgaaggcccctgccctcggcccgggatcatgaaaggcctcggtgacagccgcccccgccacctctccgacagcctagacccaccccacgagcccctgtttgcagggaccgaccgcaacccctacctgctgtcgcccacggaggccttcgcccgcgaggcccgcttccccgggcagaacaccctgccaggagatggcctctttcccctcaacaaccagctgcccccgcccagcagcacctttccccgcatccactacaactcccacttcgaggtgccagaggagagccccttccccagccatgcccaagccaccaagatcaaccggctgcccgccaacctcctggaccagtttgagaagcagctgcccatccaccgtgatggcttcagcaccctccaatttccccgtggcgaggccaaggcccgtggtgagagccctggccgcatccgccacctggtccactcagtccagcggcttttcttcaccaaggcaccctcactggagggcacagcgggcaaggtcggtggcaatggcagcaagaagggtggcatggaggacggcaagggccggagggccaaaagcaaggagcgggccaaggctggggagcccaaacggcgcagccgctccaacatctcaggctggtggagctccgatgacaacttggacggcgaggccggcgccttccgcagcagtggcccagcctctgggctgatgatactaggccgccaggcagaacgcagccagccacgctacttcatgcacgcctacaacaccatcagtgggcacatgctcaaaaccaccaagaacaacactactgagctgactgccccaccacccccgcccgcacccccagccacctgccccagccttggggtgggcactgacaccaactacgtcaaacggggctcctggtccactctgaccctcagccacgcccacgaggtctgccagaagacctcagccaccttggataagagcctgctcaagtccaaatcctgccaccagggtctagcctaccattacctgcaggtgcccggcggcggcggcgagtggagcaccacgctgctgtccccacgcgagacggatgccgcggccgagggccctatcccgtgccggcgcatgcgcagcggcagctacatcaaggccatgggcgacgaggacagcgacgagtccggcggcagccccaagccctcacccaagaccgcggcgcggcgccagagctatctgagggccacgcagcagtcgctgggagagcagagcaacccccgcaggagtctggaccgcctggattcagtggacatgctgctgccctccaagtgtccgagctgggaagaggactacacccccgtcagcgacagcctcaacgactccagctgcatcagccagatttttggacaggcctccctgatcccccagttgtttggccatgagcagcaggtacgggaggcagagctgagtgaccagtatgaggcggcctgcgagtcagcctgcagtgaagcggagtccacagcggcagagacgcttgacttgccactgcccagctacttccgctcccgcagccacagctacctgcgtgccatccaggcaggctgctcgcaggaggaggacagtgtctccctgcagtccctctccccaccgcccagtaccggcagcctcagcaatagtcgcacgcttccgagttcatcatgcctagtggcgtataagaagaccccgccaccggtccctccacgcaccacttcaaagccgttcatctcagtcacagtccagagcagtactgagtctgcccaggacacctacctggacagccaggaccacaagagcgaggtgactagccagtcgggcctgagcaactcgtcggacagcctggacagcagtacccgaccgcccagcgtgacacggggtggagtcgccccagcccctgaggccccagagccacccccaaaacatgcagctctgaaaagtgaacaagggacgctgaccagctctgagtcccaccccgaggccgcccccaaaaggaaactgtcatcgataggaatacaagagaggactagaaggaacggttcccacctctcggaggacaacggacccaaagcgatcgatgtgatggcaccctcctcagaaagcagcgtcccctctcacagtatgtcctcccgacgggacacagactcggatacccaggatgccaatgactcaagctgtaagtcatctgagaggagcctcccggactgtacccctcaccccaactccatcagcatcgatgccggtccccggcaggcccccaagattgcccagatcaagcgcaacctctcctatggagacaacagcgaccctgccctagaggcgtcctcgctgcccccacccgacccctggctcgagacctcctccagctccccagcagagccggcacagccaggggcctgccgccgagacggctactggttcctaaagctactgcaggcagaaacagagcggctggaaggctggtgctgccagatggacaaggagaccaaagagaacaacctctctgaagaagtcttaggaaaagtcctcagtgctgtgggcagtgcccagctactgatgtcccagaaattccagcagttccggggcctctgtgagcaaaacttgaaccctgatgccaacccacgccccacagcccaggacctggcagggttctgggacctgctacagctgtccatcgaggatatcagcatgaagttcgatgaactctaccacctcaaggccaacagctggcagctggtggagacccccgagaagaggaaggaagagaagaaaccaccccctccggtcccaaagaagccagccaaatccaagccggcagtgagccgcgacaaggcctcagacgccagcgacaagcagcgccaggaggcccgcaagagactcctggcggccaagcgggcagcttctgtgcggcagaactcagccaccgagagcgcagacagcatcgagatttatgtcccggaggcccagaccaggctctgagaccatgcaggaggaaagaaacgattttaaatcattaaaaacacaaaaactaagtgcgaacggaacagagttttctcaacctttgctatggttattctgtctagagaccctgagccaactttcaaattgacgcatacaagggctcacaatttggcttttttgggtccctcccagctttaggttatgaagattttactcacaaaaaaaatcaacaaaaatcacgaaactagaaaactttttttttcctcttgctggccgtggtggactagatagatggacgtcggcaactcccggcccagcctccatactgcggtctttttactcgttctatctgatgagaactcacactagcttgtttacaagatgacgacagtccaagggcagccttgggcacctgccatgtccctcctttccccagctatccccgctctgaccttgattttcattcttatgtttttctcttttcccttcagagctcacacagtggtcaccattgtggcaagcggctttctgggtctcagccctctctgcggttgagggcccagaggacagagagatggacatgcgtcccctccctccccccgccaagtgctcacacacaacctcacgcgcacacacacacacgcagatggaggcgcctcactgggaggtgccccgccagccctgggcagtgtcaggcaggactcactcaccgctgagcagatgagagaagttttagtcttggcgggtggaaatgagacgaagccacagttatcacactccagactcctgcccttttattttctccagccccttcttccttcagcaaaatctaggactcccgagtggcttccagggggccgtcagtcctcagccgcgcctgtgtccggtgcccgaggggcgggcggcggtgtctgtatgtatgtgtacatatgcacatagaccttagagtgtatagttaacaaacgcccatctgctcacccatgcccacccagcgccgccgccgctggctctcggggcacctggcaggaggcgggtgtgtgaatagcatatatttttacatgtactatatctaggtgtgtgtacaagtgtgtgtaaaaatatataccttgtgtgtaagcagccctttttttttttggtctccacccccctccccccgccccgcactcctaagggcccatctgcccagcctctgagttttctgttctattttttttttaaccccaattatccttctctctctcctgcccccgcatcccactcccagggtgtcacgagccctgagctgcaatggcccgggcctgcagggcggggtaggggagggcaggggctcagccccgaagccagctcagtacctgaggggctgctctatgctgtgtatgcgcctctctggcatccgagacatcctcttggctggcgcttgctgcaggggggaccccccccccgtccccaggtgaaccaagggtctgctccggggcccatttccagcttggccgccgtctgtgaccttgggcaagtcacttgacctctgtgtgcctcaacttcctcctctgtaaaacggggacagtccctgcccctccctacctcacaggcatgttgtgagaataaatgaggtaacgtgta

SEQ ID NO: 76 - DNA, 2551 bp, Homo sapiens
  misc_feature: Incyte ID No: 334370.3
gggcgccagacccggctttgccgtccggctattagcctactgtggctagtcacccccggggtcccggccttctcgggctggggccgccgccaccgcggcaggacggggaggcgggccatggcgtcctgcgtggggagccggaccctaagcaaggatgatgtgaactacaaaatgcatttccggatgatcaacgagcagcaagtggaggacatcaccattgacttcttctaccggccgcataccatcaccctgctcagcttcaccatcgtcagcctcatgtacttcgcctttaccagggatgactctgttccagaagacaacatctggagaggcatcctctctgttattttcttctttcttatcatcagtgtgttagctttccccaatggtccgttcactcgacctcatccagccttatggcgaatggtttttggactcagtgtgctctacttcctgttcctggtattcctactcttcctgaatttcgagcaggttaaatctctaatgtattggctagatccaaatcttcgatacgccacaagggaagcagatgtcatggagtatgctgtgaactgccatgtgatcacctgggagaggattatcagccactttgatatttttgcatttggacatttctggggctgggccatgaaggccttgctgatccgtagttacggtctctgctggacaatcagtattacctgggagctgactgagctcttcttcatgcatctcctccccaattttgccgagtgctggtgggatcaagtcattctggacatcctgttgtgcaatggcggtggcatttggctgggcatggtcgtttgccggtttttagagatgaggacttaccactgggcaagcttcaaggacattcataccaccaccgggaagatcaagagagctgttctgcagttcactcctgctagctggacctatgttcgatggtttgaccccaaatcttcttttcagagagtagctggagtgtaccttttcatgatcatctggcagctgactgagttgaataccttcttcttgaagcatatctttgtgttccaagccagtcatccattaagttggggtagaattctctttattggtggcatcacagctcccacagtgagacagtactacgcttacctcaccgacacacagtgcaagcgcgtaggaacacaatgctgggtgtttggggtcattggtttcctggaggccattgtttgcataaaatttggacaagatctcttctctaagacccaaatactctatgttgtgctttggcttctttgcgtggctttcaccactttcctctgtctgtacggcatgatttggtatgcagaacactatggtcaccgagaaaagacctactcggagtgtgaagatggcacctacagtccagagatctcctggcatcacaggaaagggacaaaaggttctgaagacagcccacccaagcatgcaggcaacaacgaaagccattcttccaggagaaggaatcggcattccaagtcaaaagtcaccaatggcgttggaaagaaatgaaaaaccctggttaatcaaagatgttccagagtgcctagaactgagagggaaatggaactcatttggaactccccgtgaggaggtcgaggcgcacagggcaagcaggaagaggcgagggcacttgggggtcattatttgagatcgtaagtcttgtttcccacagacctggccgcgtcaggcagatcatcgcctggggggcctttgccaacgtggggtctcttctaacttcagcacttgacatgcggtcaccggtggcagcgcggtgtgttgaagggaaacggtagctattcattcacagttgccaagagcagctccgcgcctgctggatcgtggatgcagcgtaaacatcttccttcagacgaggcattaaccccatggttaatggactggtcaccagtttttattttatttttatgaatctacctttccattgattgatttaagttcaggccacttttctgtcttttatttggttactgttgttatttgtttttaagttaggatgctttttaacagcctttagaagccgctgctgaaattgatactgggggaagggttccccttccttctagagcagaaaagggagagaggtgttgtattcctgtttggtaacctcagtctcctgtaagacctcctaccacatggcgagtatacaccaatcaggagagggtagctgcctgcataggagcctcgcttccgattattcccttcccaatattattcatccagacttagccacagtgcacaaaagcaaacctgctagagaggcagtgaacaccacagcttctccccagctaggtgccttttacatcgggtttgttctccttccatggtgtgttgctgacattgtcactgagtcccatgtgaggtgctggtgagtattacctttcatctgtgccatgctctagaaccttgaccttgatagttcaccacctctgatggatccctgttttaaataaaaacgattcactttaaagcctaaaaaaaaaaaaaaagggcggccgctctagag

SEQ ID NO: 77 - DNA, 708 bp, Homo sapiens
  misc_feature: Incyte ID No: 980461.1
aaacattctccagttctcttagtgtgcacatgtttcaggaggtgtgaaccccacatgtagcttgtgtaggcaagaagacaaatagtgctactgtctggtcaaggatttgtttgaagagccatgattatgcccatatggtaagccaccagtgctccccatccctgtaagacacttctttctcattattttctcctctgatggtgtgccaggatgctggccaagagaagccaagtggaaagaaggctgttcagtgacaaggaacctaagacttagtgccaaggactgaaaccaagtaaacttgtaattttccatgatggaaacatctacactttctcattagtggcctctacagcagttgccccaaagaagcgtctcattgtttttttactacatttatgtgaagcatacaggcaaactcagaaagactgtgataaggctcgccagagatgcctgcacaggtgctgggggaaaagcaggaccatcctgaagggagatggtgtctgtggacaaagaactctgcagtggttcttatttgcatgatttctgctggtggaggctgtaaatgtgagctcaaactcccacataagtgagttttcattgtaatccagaatgtttttaaatcaccctacttctattgaacttgcactatcatctgttaacctctactgtatttattaaataaacctgaataggtaaatcacaaaaaaa

SEQ ID NO: 78 - DNA, 4748 bp, Homo sapiens
  misc_feature: Incyte ID No: 422969.4
  unsure 4064, 4068, 4074: a, t, c, g, or other
cttcccggcggtggcggcgtctctggccggccttggtgcggcgagccgagcgaggcagctctgagccgcgcggaaatctggcattttttaaagtttgcgccccacaaagaggaaatattccaaaggtactcaggatgtaaaaggggagatcttcacagatgcctccgtggatggcatggcaatccatccatcaatgagaagaccatgatttcttttaattttctgtgtgtttccacattccccagtgagaattcttccacctttttttgtgccatgggaaaaacctgaagggcaggcagagctgctcccgaacttgtgaccttctctgaggttgcagcggctcttgtagaacatgactctgggacatcacttccttttgttttctttcggagctgaaccaaagaatgtgcaccctctttctctagtgctgtggtgtctgcttatttttgtatttgtgctttccatccatcttctgtgatcacaaggcattcttaaggttttctagcacgacttgcggacatccagactcgtggggggcccacccatggctcggtaagccagcagcccagggcactggcactaccatgaggcactgcattaattgctgcatacagctgttacccgacggcgcacacaagcagcaggtcaactgccaagggggcccccatcacggtcaccaggcgtgccccacgtgcaaaggagaaaacaaaattctgtttcgtgtggacagtaagcagatgaacttgcttgctgttctcgaagtgaggactgaagggaacgaaaactggggtgggtttttgcgcttcaaaaaggggaagcgatgtagcctcgtttttggactgataataatgaccttggtaatggcttcttacatcctttctggggcccaccaagagcttctgatctcatcacctttccattacggaggcttccccagcaaccccagcttgatggacagcgaaaacccaagtgacacaaaggagcatcaccaccaatcctctgtaaataatatttcatacatgaaggactatccaagcattaaattaattatcaacagcatcacaactaggattgagttcacgaccagacagctcccagacttagaagaccttaagaagcaggagttgcatatgttttcagtcatccccaacaaattccttccaaacagtaagagcccctgttggtacgaggagttctcggggcagaacaccaccgacccctacctcaccaactcctacgtgctctactccaagcgcttccgctccaccttcgacgccctgcgcaaggccttctggggccacctggcgcacgcgcacgggaagcacttccgcctgcgctgcctgccgcacttctacatcatagggcagcccaagtgcgggaccacagacctctatgaccgcctgcggctgcaccctgaggtcaagttctccgccatcaaggagccacactggtggacccggaagcgctttggaatcgtccgcctaagagatgggctgcgagaccgctatcccgtggaagattatctggacctctttgacctggccgcacaccagatccatcaaggactgcaggccagctctgcaaaggagcagagcaagatgaatacaatcattatcggggaggccagtgcctccacgatgtgggataataatgcctggacgttcttctacgacaacagcacggatggcgagccaccgtttctgacgcaggacttcatccacgcctttcagccaaatgccagactgattgtcatgctcagggaccctgtggagaggttgtactcagactatctctactttgcaagttcgaataaatccgcggacgacttccatgagaaagtgacagaagcactgcagctgtttgaaaattgcatgcttgattattcactgcgcgcctgcgtctacaacaacaccctcaacaacgccatgcctgtgaggctccaggttgggctctatgctgtgtaccttctggactggctcagcgtttttgacaagcaacagtttctcattcttcgcctggaagatcatgcatccaacgtcaagtacaccatgcacaaggtcttccagtttctgaacctagggcccttaagtgagaagcaggaggctttgatgaccaagagccccgcatccaatgcacggcgtcccgaggaccggaacctggggcccatgtggcccatcacacagaagattctgcgggatttctacaggcccttcaacgctaggctggcgcaggtcctcgcggatgaggcgtttgcgtggaagacgacgtgagagctgaattgttgctgcacgtgctgggcccgccaatgccgtcatcatcaggattttacaaatctctttgcggggaactgtttcactcatggtatggaaaaccccaggactctgccactctaggcacacatgcaattataaccattttggaatttccttcgtgatgttcgagagctcagcaatggacccctcacagagctcctctatccgaggccattggagaccccagtttctcaagaattcagctctgctctgagcgtcctggagcttggggatgcagccagctggcctgcactgggtgtggagagaacacctagggaaggcagcctggccctgcccgcctccgccttctggagagcctctgggttctgagtcagcaagccagaggtcatgccacaggcctggctggaacttacacttcacgttccctttttttccccctagagatggggtctcgccgtgttgcacagactgtctgtattcaatggctatcttcacaggtgtgatcataccacattcacttctgaaacactcttgttgcgatcgctaacctcactgggacagagaaccgcagtctttcgagaatggaggctcttcattttttttttctcctttactccaaactcagccctccagtttcttcagatgtaaaccctgttaacgtcactgtttccaaaaggaaaaaaataagtcagtttttggcagcaccttcatctttctgacctcctcctattctgtccttgtggacttatgtttaacatagaaaatgaatgcgtttaaaacaaaaccactttctgcatttaaccagtcctggctctctctctgctgcctcttcatacgttttctcaagaacttcagtttataattggaagagaaatttttgctgttaatgccagaatgagcaacctcaaggaattgaacacttcttggaaaatctaggtaattcaagccctcatcaggtttacaagatcatcagagaaacagaggattttaatttttagttctggccggctacaggctccatttctctgccttcccattggaaatagtttatttccacattctccactgcgtgtggtcaaagttcctcacccagcaagggactatagatactcgtgtcccaattccaaaacacaatgcacaagctgaacttgggctgaacgtggcgtgttgagatttggaatgaggtttctaagagccgtgttcttcatggaattttccaggccacttggcagcttggtttaccgatggatgggctagagatcttgtcgtttcttggaagtcacagggaagattgaagagaacgcttgagcatccttggcaacagcccaggtgggacctggatgaagctttgcactcaagtattgtcaagggaagcttcctgtgaaccaaagttctcaggccaaggtctcgcccaccaaagccagaaagtgcaagcacccgtctacccagctctaacttgtatgtgtgagacagaccaggcttcgggggtaggaggatctgcagttgttcagccgtctttctgctggtgttgtctttctgccatcagagaagggacacacagcccgttcgaaggtgtgcagagggctctgagcgccaggatggccagggctgtttttgctactgaaggagcgtgtgtcctgaactcccacttgcagggacagtccccaccttctctatagccggcactgggagcagccgccagcagggaaatctggcctgagcacaaggatgctttagggagagatcacttcagtgtgtgtgtatatttatttgcagtacagtgcgcgcttntttntgtgtntacgcgcacgtgtgggtgagtgcgtcttctgagtgggttctgttcagttgctaatgaggctcctccgctctggacacaacccttttatagattaatttctctgccaattaacttgtcattttcagtacatattttactattccacaccaaccataattacaacaagggatttttcttatgcactcctatgcatgtgaataacatgtggtgtaattctgcttcttacagaagtattactgaaggtattatttccaatattatttggtttattatgcggatcttttttatatatgcagtcccatcccttctgtgccactcaatgccatccagacatggtttttccctccaggggcctttctccagagggcacttcggctgcctctgcttcctctcattcgaggcccggctcttgctgacagaataggttccgttctgggcggtggttctcgagcctgccattcaaaaccaaagcaaattggagcatttctcacaacatggtattgaagttcctttttgttctcaaaagttgtgaccgtgttaaattgtactcccttagtcctgtaaggtatgttaagtgaatcgcagttacgctgtacttttattaatatttaacataattaaagatggacccataagagtgacgcctgtggagcgcgtgctcttcctctgcagcc

SEQ ID NO: 79 - DNA, 5262 bp, Homo sapiens
  misc_feature: Incyte ID No: 244150.4
gccgctactgccggtgcagccgccaaaccggtgcctcggtgacgaccgtgtccctgccgtcttcctcgagctccccggggcttgacccccggggccctcggcaggcatcggtgaggagcctgcggagcgaacctgtgctcctattcttgcccttcaggaccccatatcgcgactccgaggaggggaagcgagaggggctgtcgcgactccgcgccgtgtgttgccgggcggggccgcggggccggggctccttcagcccccgggatgcgcgcgcgagccctcgcctccacttccttgttgctgctgtcacgactggagccgcctctcgccgacagcggggagcgcgagtgcgccagccatccccctcgtccagccgccgggccaagcgcctccgggaatgtgagcggcgcagcttgcacgctcctccggccatggacgcatcatatgatggtactgaggtaactgtcgtgatggaggaaattgaggaagcctattgttacacctctcctgggccacccaagaagaagaaaaagtataaaatacatggagaaaagacaaagaaacccaggtctgcttaccttctgtactattacgacatctacctgaaagtgcagcaggagctcccccacctccctcagtctgagatcaataagaagattagtgagagttggaggcttctcagcgtggccgagaggagttactacttggagaaagccaaactagagaaggaaggtttggatcctaactctaagctctctgcactgactgctgtggttccggacatcccaggtttccgcaagatcctcccacgctcagattatatcatcatccccaagagcagcctgcaggaggaccggagctgccctcagctagagctatgtgtggctcagaaccagatgtccccgaaaggacctcctcttgtgtccaacactgccccggagacagtgcccagccatgcaggcatggcagagcagtgcctgggctgtggaggccctggctgaggaggtgggagcccttacccagtcaggtgctgtacaggagattgccacctcagagatcctcagccaggatgtgctcctagaggacgcttccctagaagtaggggagagccaccaaccttaccagacaagcctggtaattgaagagaccttggtgaatggctcaccagacctccccactggaagcctggctgtgccccacccccaggttggggagagtgtatcagtggtaacagtcatgagggattccagtgagagtagctcctctgcaccagccacacagttcatcatgttgcctctgcctgcctactcggttgtggagaaccccacctccatcaaactgaccactacatatacccgccggggccatgggacatgcaccagcccagggtgctcctttacatatgtcaccaggcacaagccacctaagtgccctacctgtggtaacttcctaggagggaagtggatcccaaaggaaaagccagccaaagtaaaagtggaattggcttctggcgtctcttccaaaggctctgtggtgaaaagaaatcagcaacctgtcaccactgagcaaaattcctctaaggaaaatgcctccaaactgactctggagaattcggaagctgtaagccagctcctgaacgtagctcctcccagagaagtaggtgaggagagtgagtgggaggaagtgatcatctccgatgcccatgttttggttaaggaagctcccgggaattgtggtacagcagtcactaagacgccagtcgtcaaaagtggtgtgcagcctgaggtcactctggggacaactgacaatgacagtcctggagcagacgtaccaacaccatccgaggggacaagtacctccagtccactccctgctcctaaaaaacctacaggagctgacctgcttacccctgggtccagagctccagagcttaaaggcagagcacggggcaagccctcattactggctgcagcaagacccatgagagcaattttgccagccccagttaacgtggggcgaggcagcagcatgggactgcccagggccaggcaggccttttccctgagtgataagactccctctgtgaggacttgtggtctgaagccaagcacactgaagcagctgggccagcccattcaacagccatctggccctggtgaggtgaagctaccaagtggcccatccaacaggacttctcaggtgaaagttgtggaggtcaagcccgatatgtttcctccatataagtacagctgcactgtcacattggatttgggcctggctacatgcaagaggccggggaaagtgcaagaatccctcttgtagctatgtctacaccaacaggcacaaacctcgaatttgtcccagctgtggtgttaaccttggccaaagaccggactgagaaaaccaccaaggctatcgaggtgagctcaccactcccagatgtactgaatgccacagagcccctgagcacagcccagagggagatccagcgccagtccacactgcagctgctgcgcaaagtcctgcagattcctgagaatgagtcagagctggctgaggtcttcgccttgattcatgaactcaacagctctcgacttatcttgtccaacgtgagtgaggagacagtcaccatcgagcaaacctcttggtcgaattattatgagtctccgtccacgcagtgccttctctgtagcagcccattattcaaagggggacaaaactccctggctgggccccaggagtgctggctgctgacagccagccgtctgcagacagtgactgcccaggtgaagatgtgtctgaacccccattgtctggccctgcacagcttcatagacatctacacaggtctctttaatgtggggaacaagctgctggtaagcctggacttgctttttgcaatcagaaatcagatcaagctcggagaggaccccagagtgtccatcaatgttgttctgaagtcggtgcaggagcagacagagaagactctgacctcggaggagctgagccagctgcaggagctgctgtgcaatggctattgggcctttgagtgcctcactgtccgagactacaatgacatgatctgtggcatctgtggtgtggcccccaaagtggaaatggctcagaggagtgaggagaatgtgctagcactgaagagcgtggagttcacctggcctgaattcctgggctctaatgaggtaaatgtggaggacttttgggccacgatggagacagaggtgattgagcaggtggcatttcctgccagcatccctatcaccaaatttgatgcgtctgttattgcccccttcttcccaccactcatgagaggagctgtggtcgtcaacactgagaaagacaaaaacctggatgtgcagccagtacctggcagtggcagtgccttggtgaggctgctccaggagggcacctgcaagcttgatgagattggctcctacagtgaagagaagctgcagcacctgctaaggcagtgtggaatcccctttggggcagaagactccaaggaccagctctgcttctccttgttggccctctacgaatctgtacagaatggagctagagctatacggcccccacgtcacttcacaggtggtaaaatctacaaggtgtgcccccatcaggtggtctgcggctccaagtatcttgtgcgaggtgagagtgcccgtgaccatgtggacctgcttgcctcttcccgccactggccgcctgtctatgtggtagatatggccacgtcagtggccctgtgtgctgacctctgctacccagagctgactaaccagatgtgggggaggaaccagggctgtttctctagccccacagagccacctgtgagtgtgtcctgcccagagctcttggaccagcattatactgtggacatgacagaaactgagcactctatccagcacccagtcaccaagactgccacgcggcgcatcgtccatgcaggcctacagcccaatcctggtgaccccagtgctgggcaccactccttggccctgtgccctgaattggcaccttacgcaaccatcctggcctccatcgtggacagcaaaccaaacggtgtccgccagcggcccattgccttcgacaatgccactcactattacctctacaaccgcctcatggacttcctcaccagccgcgaaattgtcaatcgtcagatccatgacattgtacagagctgccagcctggtgaggtggtcattcgtgacaccctctaccgccttggggttgctcagatcaagacagagacagaggaggagggtgaggaagaggaggtggccgcagtggcagaataagccaggctgttgtacagggactacaccatctctcaagccatagtaaggcccttgcctgaggcagagctatccaggggacctgcagaagtggtctcctgtggggagggcctctgactgctgggactgaccaaagagcttccattccctgagcatggtgggacccagggtcctcagttctcaaccctccaggggtcaggagtggtaccaggaaacctcttctggccccgagagagcacttgggggacacggtatgtttaatggaggggaggctgagggaaaggctggtagctggtgggttccgtggggcctgctgtgtgggtcagggtggaggtcctgggtgggctaaggcgtgagccccagcactaggtgggaaggctgctgaggtctctcccacccctgaggagccctggtttcagccccctcagtctgatgaattgcttagcctgttgcctttgactaggggcctgggtggcctcattaactctaggggtccctttgggctcttgattctccctgaaggagggatgcatttctctcttgctcttcctgtacccacatttgggggaagctgaggagggaggaacagtcagccacagctctcttccagcactgtcctctccaccccaagctttgaggaagagcatccccttcctcctttccctggccactgctgctgcagccaatatcctctctgggcctgggaccctctccacagaggggatgtggtccctggtcatgacataacctagcagcagtaggaaaaactcccttctatgaaggggaagcagactgggccataaggaaacagcaggactggctcaagtgcccaaggtttgtttagggcctgggaattggccatgtgttaatttattgagtggagtaggtggctttttttccctccctcttcccccaacaagaataaagtttattaaattatctggaaaaaaaa

SEQ ID NO: 80 - DNA, 3599 bp, Homo sapiens
  misc_feature: Incyte ID No: 410257.11
gctgggatgggaggcagcatgtctatctggagcaggtgctgccacgctgcgctgagggataggctggcggtcgaagccctagccaggctctccaccacaagggactcttggctggtccagaaagatctgcagagtgaatttgggatcacaggagaaccacagcccagcagtttcagtccttccagctggtgtcaaggtgcttctcaggactatggccttgggggtgcaagccctagaggagacccaggtctcggagagagggactggaccagcaagtatgggcaaggagcaggggaagggagcaccagggagtgggccagcaggtgtggcatcggccaggaggagatggaggccagcagcagccaagaccagagtaaagtgtctgccccaggggtgctcacagcccaggaccgggtagttggaaagccagcccagcttggcactcagcggagccaggaggcagatgttcaggactgggagttcagaaagagggattcccagggcacttactccagccgggatgcagaactccaggaccaggaattcggaaagagagattcactgggtacctacagtagtcgagatgtaagccttggggactgggaatttgggaagagagattctctgggtgcttatgccagccaagatgccaacgagcagggccaggatttggggaagagggaccaccatggtaggtacagcagccaggatgccgatgagcaggactgggagtttcagaagagagatgtgtcactcggcacctatggcagccgggctgcggagccacaggaacaggagtttgggaagagcgcttggataagggactacagcagtggtggcagctccaggacccttgacgcccaggacagaagctttggaacgagacccctgagctctgggttcagccccgaggaagcccagcaacaggatgaggaatttgagaagaagattccaagtgtggaagacagccttggagagggcagcagggatgctggccggccaggagagagaggatccgggggcttgttcagtcctagcactgcccacgtgccggatggggcactcgggcagagagaccagagcagctggcaaaacagtgatgctagccaggaggtgggagggcatcaggagagacagcaggcaggggctcagggccctggcagtgctgacctggaagatggggagatgggaaagcgaggctgggtcggtgagtttagcctcagtgttggcccccagcgagaggcagcatttagcccagggcagcaggactggagccgggacttctgcatcgaggccagtgagaggagctatcagtttggcatcattggcaacgacagagtgagtggtgctggctttagcccttctagcaagatggaaggtggtcactttgtgcctcctgggaagaccacagctggctcggtggactggactgaccagctgggtctcaggaacttggaagtgtccagctgtgtgggttctgggggctcgagcgaggccagggagagtgccgtgggacagatgggctggtcaggtggcctgagcttgagagacatgaacctgaccggctgtttggaaagtggagggtctgaagagccggggggaatcggagttggggagaaggactggacttctgatgttaatgtgaagagcaaagatttggctgaggtcggggagggaggaggccacagccaggccagagagagtggcgtggggcagactgactggtcaggtgtggaggccggagagttccttaaatcaagggagcgtggagttggacaggcagactggacacctgaccttgggctgagaaacatggccccaggggcagtctgcagtcctggagagtccaaagagcttggggtgggccagatggactggggtaacaatctgggcctgagggatttggaggtgacctgtgacccagactctggaggttctcaggggctacggggatgtggagtggggcagatggactggacccaggacttggcgccccagaatgtggagctctttggggctccaagtgaagccagggagcatggggtgggcggggtgagccagtgcccagagcccggcctgaggcacaatggcagcttgtctcctggcctggaggccagagaccccttggaggccagggagctgggggttggtgagacaagtgggccagagacccagggtgaagattactcctcgtcttccttggagccacaccctgcagaccctggaatggagacaggagaagccctcagcttcggagcaagccctggcaggtgcccggcccgccccccaccctccggctcccagggcctgctggaggagatgctggcagccagcagctccaaggcggtggctcggagggagtcagcggcctcgggccttgggggcctgttggaggaggaaggagccggggcaggtgctgcccaagaggaggtgctggagcctggcagggactctccaccctcctggaggccgcagcctgatggtgaggccagccagacagaagacgtggatggcacctggggctcttcagcagccaggtggagcgatcaggggccagcacagacttctcggcgaccctcccaaggccctcctgccagatcccccagtcaggacttctccttcattgaggacaccgagatcctcgacagtgccatgtatcggagccgtgccaacttggggcgcaagcgtgggcaccgggccccggtcattcggcctgggggtaccttgggcctgtcggaggcagcagactcggatgcacacctgttccaggactctacagagccacgggcatctcgggtgccatcttcagatgaagaggtagtggaggaacctcagagccgccggacacggatgtcgttgggcaccaaggggctgaaagtcaacctctttcctggcctgagcccctcagccctgaaggccaagctgcgcccccggaatcgctcagctgaggagggagagctggctgagagcaagtcgagccagaaggagtccgcggtccagcgttcgaaatcctgcaaggtcccaggactgggaaagcccctcacgttacctcccaagccagagaaatcctcagggtcagaaggatcgtcgcccaactggcttcaagccctgaaactgaagaagaagaaggtctgagaagtcactgaggttcttcccacctggcagtctcaggcagtgcccattcctgtggggtccctgggtgaggagacggctggagccccaccatgccccaggctgcagcctctgtcccctccacctctgaggagcgtctggggaggcacatttatgcactttgtatcaccctccgaactccccccacaccttcccttccctggatttcatcactagtggttgaaggttttgtcccttcctctcctccttccctctccctctctgcttcctcctccagcctcccttgggttttcttttgataccaatttatagcattttttataaaagcctttgatttttataatgggtgggactgtatccctgcctcaccccaggtctccgtctgccccgccaggtaccccacagagaccaatgacattttgccacttgaaacaataaataaagttttttgggaattggtgctgtcc

SEQ ID NO: 81 - DNA, 654 bp, Homo sapiens
  misc_feature: Incyte ID No: 028253.3
aaaaaaagaaagagaccatcccaggaagttgtggggttggggaggcctagggttaggcaagaccttgaggcaggggttgaagccagggagtggtcagccagcactgtccctgcctgtccccatcccacagagggcaaggagttggtgcacacctacaagggctgcatcaggtcccaggactgctactccggcgttatatccaccaccatgggccccaaggaccacatggtaaccagctccttctgctgccagagcgacggctgcaacagtgcctttttgtctgttcccttgaccaatcttactgagaatggcctgatgtgccccgcctgcactgcgagcttcagggacaaatgcatggggcccatgacccactgtactggaaaggaaaaccactgtgtctccttatctggacacgtgcaggctggtattttcaaacccagatttgctatgcggggctgtgctacagagagtatgtgctttaccaagcctggtgctgaagtacccacaggcaccaatgtcctcttcctccatcatatagagtgcactcactccccctgaaaagctatctgaacagaggaagataatgtagtgtgaagtccccatttgtcctcagcctgtaactccccgtgtgcctataaagaagttaatagagca

SEQ ID NO: 82 - DNA, 2954 bp, Homo sapiens
  misc_feature: Incyte ID No: g31670
tgggccgcagccctccccgccccgccgaccgcggtcacacactctcggagcctccccgtgagcgggagcgcggcgcacggcgatgcgccgaggcgggcgctgaggcggcgccgcgcgagcagcagcagaggcggcggcggcccccagcccagcccggcgccgccgccgagcccgggccccaaggtgcggcggcgccccaagttcccgccatgagcagccggctcggggggctccgcggccccggggactcccgccccgccgggcgcgaccgcagcgccccgcggccccgacgcgcttaacgttgtcgcttgccggtcccgccaccgccgcctccgccgccgctcgcgtcctcgccgccaccgcctcggccgctgcagctccgccggcagcatgtctcgaaggaagatttcgtccgagtccttcagctccctgggctccgactacctggagaccagcccggaggaggagggggagtgccccctgtctaggctctgctggaatggcagccggagcccgcccgggccgctggagcccagcccggccgcagctgccgctgccgccgccccggccccgaccccggctgcttctgccgccgccgccgctgccactgccggggccaggagggtgcagcgccggaggcgggtcaacctggactcgctgggcgagagcatcagccgcctgacggcgccctcgcctcagacgatacagcagactctcaagaggacactgcagtattatgaacatcaagttattggttacagggatgcagaaaagaatttccacaatatctctaacagatgctcctatgcagaccactccaacaaagaagaaattgaagatgtctcaggaattcttcagtgtactgctaatatactcggtttgaagtttgaggaaattcaaaaaagatttggtgaagagttctttaatatatgctttcatgagaatgagagagtccttcgagctgtaggtggcactttgcaggacttttttaacggctttgatgctttgttggaacacattagaacttcttttggaaaacaggccactctggagtcaccatctttcctatgcaaagagctccctgaaggtactctcatgctccactacttccaccctcaccatattgtggggtttgcaatgctggggatgattaaggctgcaggaaagaagatctatcggctggatgtggaagtggaacaggttgcaaatgagaagctatgctctgatgtttcaaacccaggcaattgtagctgtcttactttccttatcaaagaatgtgaaaatactaatatcatgaagaaccttccacagggaacctcccaagttcctgcggacctcagaattagcatcaacaccttctgtagagccttccctttccacttgatgtttgatcccagcatgtcagtccttcagttgggggaaggtctaaggaagcagcttcgatgtgacactcacaaagtgctcaagtttgaggactgcttcgagattgtatctccaaaggttaatgccacctttgaaagggtcctgctgcgactgtctaccccgtttgtgattagaaccaagcctgaggcttctggctctgaaaataaagacaaggtgatggaagtcaaaggacaaatgatccatgttccagaatcaaattccattttatttttgggctctccatgtgtggacaagttggatgaactcatgggccgagggctacatctctcagacatccctatccatgatgccacccgagatgtcattttggttggtgagcaggcaaaggcccaagatgggttgaagaaaaggatggataaattaaaggcaactttagaaagaactcaccaggccctggaagaagagaaaaagaagacagtggatcttctatattctattttccctggtgatgtagcccagcaattatggcaagggcagcaagtacaggccagaaagtttgatgatgtcaccatgctcttttcagacattgttggcttcacagccatatgtgcccagtgtactcccatgcaagtaatcagcatgctgaatgaactgtacaccagatttgaccaccagtgtggatttttggatatttataaggtggaaacaataggtgatgcctactgtgttgcagcagggctccacagaaaaagcctctgccatgctaaacccattgctctgatggccttgaagatgatggaactttcagaagaggtgctgacacctgatggaagaccgattcagatgaggataggaattcactcaggctccgtgctggctggagttgttggggtgcgaatgccacgttattgcctgtttggaaataatgtcacactggcaagcaaattcgagtcgggaagtcaccctcggcgcatcaatgtcagcccaaccacttaccaattattaaaacgagaagaaagtttcacattcattccgcggtctcgtgaagagcttccagacaactttccaaaggaaattcctgggatctgctatttcctggaggtaaggactggtccaaagccaccaaagccttctctttcttcgtcgagaataaaaaaggtttcctacaacatcggcaccatgttcctccgggagacaagcctctgagacctgctacagatcaaagactcctccaaaaagcacaagcccagaacatgggtcaccaatggggggtggaaagagattgtgtctctttcattgctttgttgagaacaagcagcaaaatttctgtattatgtcaggcaataatcctactaaaaggtggaggtgaccgctgtcaataaaaagccggaggatgagggaaataagatgtgtccattcatatgagtggttttggtcatatatatacacatatattttaattacaagtgtgggtcccctttcagaactaaccaataaatagattccatgttttcttgtttatcacacatacaagtatctttccctatatatttgtaccacttttgagagcc

SEQ ID NO: 83 - DNA, 2382 bp, Homo sapiens
  misc_feature: Incyte ID No: 977552.1
cctactttctctagaccagaaaattcccaaaattgtgcacattagaatcacgtgggtagcccacaaaattcccagtgccaaattataacctgcctttcctgtggcccagtggtttccaacgacattgggctctcagtctgagaagtgtcctataatactggctttacattggcctcaggctgaaccttggacgtggcaggtattgcaaatattttccgcggtgcgcgcggattctggacttgggcgccaactcgtagtccacgctccccggggtcagcagaggggcgctcacgctctcgccacccacctcgctttctcaccccgcgcttcccggcctgggtttttagtcttccttggagcgctctctggcctccgcctccgccagggagcggaaggcggagacagcgagactggccaggggggaggaaagaggacgcgtgtgggcaagggggacaacgggatgtccacgggctcggtgagtgatccggaggagatggagcttcgggggctgcagcgggagtacccggtccccgcctccaagaggccgcccctccgcggcgtagagcgcagctacgcctcgcccagtgacaactcgtcggcagaggaggaggaccccgacggcgaggaggagcgctgcgctctgggcacagccggcagcgcggaaggctgcaagaggaagcggcccccgtgtggctgggggcggcggcgcaggtggtagcgcgggcggtggtggcaagaagcccctcccggccaagggctcagccgcagagtgcaagcagtcgcagcggaacgcggccaacgcccgtgagcgtgcccggatgcgcgtgctgagcaaagccttctccaggctcaagaccagcctgccctgggtgccccccgacactaagctctccaagctggacacgctccggctggcttccagttacatcgctcacctgcggcagctgttgcaggaggaccgctatgagaacggctacgtgcacccagtgaacctgacatggccattcgtggtctcgggaagaccggactctgacaccaaagaagtttccgcagccaacagactatgtggaaccaccgcttaaatcggactggaactcacttgatgggattattcgttaaatgcgagtgtttgggggccacggagagaagggagagctcgtgagatgggaagaagtttccgctggattctccttgacccttcccctttccctggaactgtgatcgtgacaggtggcgggtgtggctgtcactgcacagcgcccacggctacagctgcgccggatctgggcgaccacgttttgcctctccaaaaagagcttcctttcgtgacgagacgcggacgcaggtccaccctcgggccctagctctgtagactaactctcggctgctgccccagcccgcgccagacagcccacggatccgttctcagcggagccagattcatcgcacacgtgcgggacggttccacacagccccggcctttcgcggtgacacaatggttagggaacggttagaacgcgctctacatccgctttaaagacagaggtctagacgtgagatccgcgtcgggacagggttttaagtgacaaagaagggcgagtggcttctctgggccgggttcgtactccagcacagcgcccttctaacgggcgggaggaaggccgctgctcgcagggctaggtggagacacacttcccagatcaccgcaggcgggttttacccggagagctctgggccgttcggcctccctgccgggtggcttcttcaatcccgtctccttcccaagctcccggctttttctaatcaggcaggcgtctgtcaaccctctccacttctgggctgaagcctccccaagccccgctgcgccaacctgtgtggggtcttcttcgggcctccctctccgccccgctcctgctcctacctgcagcacccccagctccgactccagactctctgcatcaggtctccccactccacgctccgggcgccccaactccaacaccacgtcctgccgcgcaggttcttccccgcgcggaggagcgcgcagggtgggcggcttaccatagcaagtgatcctgcgatagggaacgcgcccttgccccgaggctgcactaccacaggaaataacatatgtaaataaatttatttttttatgaataataaaacgcgctgtaaaaaccgtgtgcccctttggaggtgtcaggatgtagtctttgttgccctttactaagagggttttgctgtagaagttaacttttaagggctgatctcctctggtcagggcggtgggtcattgcgggaggaatggtggcgatcacttttggatcactccatttccaaacgtcattctttattaatctctatgattctgctgcttctccg

SEQ ID NO: 84 - DNA, 675 bp, Homo sapiens
  misc_feature: Incyte ID No: 977552.2
  unsure 50: a, t, c, g, or other
ggggaagggaactaaacgacagaacctcaaagtcagatgagtttcaccanattatcctgcgggcaaagtccaggaagaagcgtgaacggatatggcaagtctcggattatcaacctccagtaaaatgaaaatcttagttcagagagaggacatgcaaattcccagaatgctgataaaatcttagctactccaagtcaggaatatctggggttcgcgtaggagagctgtttcggtttgagacaatcgtttctctctaatatctcacgttctttttgatttacagacatggccattcgtggtctcgggaagaccggactctgacaccaaagaagtttccgcagccaacagactatgtggaaccaccgcttaaatcggactggaactcacttgatgggattattcgttaaatgcgagtgtttgggggccacggagagaagggagagctcgtgagatgggaagaagtttccgctggattctccttgacccttcccctttccctggaactgtgatcgtgacaggtggcgggtgtggctgtcactgcacagcgcccacggctacagctgcgccggatctgggcgaccacgttttgcctctccaaaaagagcttcctttcgtgacgagacgcggacgcaggtccaccctcgggccctagctctgtagactaactctcggctg

SEQ ID NO: 85 - DNA, 4893 bp, Homo sapiens
  misc_feature: Incyte ID No: 347829.6
cgcagcccccgcagggcagggcccgccgtccggacccgggcaaccggcacccgcggcgacccaggcggcgccgaggcaccccccgccgggcatcagatcgtgcacgtccgcggggactcggagaccgacctggaggcgctcttcaacgccgtcatgaaccccaagacggccaacgtgccccagaccgtgcccatgaggctccggaagctgcccgactccttcttcaagccgccggagcccaaatcccactcccgacaggccagtactgatgcaggcactgcaggagccctgactccacagcatgttcgagctcattcctctccagcttctctgcagttgggagctgtttctcctgggacactgacccccactggagtagtctctggcccagcagctacacccacagctcagcatcttcgacagtcttcttttgagatacctgatgatgtacctctgccagcaggttgggagatggcaaagacatcttctggtcagagatacttcttaaatcacatcgatcagacaacaacatggcaggaccccaggaaggccatgctgtcccagatgaacgtcacagcccccaccagtccaccagtgcagcagaatatgatgaactcggcttcaggtcctcttcctgatggatgggaacaagccatgactcaggatggagaaatttactatataaaccataagaacaagaccacctcttggctagacccaaggcttgaccctcgttttgccatgaaccagagaatcagtcagagtgctccagtgaaacagccaccacccctggctccccagagcccacagggaggcgtcatgggtggcagcaactccaaccagcagcaacagatgcgactgcagcaactgcagatggagaaggagaggctgcggctgaaacagcaagaactgcttcggcaggagttagccctgcgtagccagttaccaacactggagcaggatggtgggactcaaaatccagtgtcttctcccgggatgtctcaggaattgagaacaatgacgaccaatagctcagatcctttccttaacagtggcacctatcactctcgagatgagagtacagacagtggactaagcatgagcagctacagtgtccctcgaaccccagatgacttcctgaacagtgtggatgagatggatacaggtgatactatcaaccaaagcaccctgccctcacagcagaaccgtttcccagactaccttgaagccattcctgggacaaatgtggaccttggaacactggaaggagatggaatgaacatagaaggagaggagctgatgccaagtctgcaggaagctttgagttctgacatccttaatgacatggagtctgttttggctgccaccaagctagataaagaaagctttcttacatggttatagagccctcaggcagactgaattctaaatctgtgaaggatctaaggagacacatgcaccggaaatttccataagccagttgcagttttcaggctaatacagaaaaagatgaacaaacgtccagcaagatactttaatcctctattttgctcttccttgtccattgctgctgttaatgtattgctgacctctttcacagttggctctaaagaatcaaaagaaaaaaactttttatttcttttgctattaaaactactgttcattttgggggctgggggaagtgagcctgtttggatgatggatgccattccttttgcccagttaaatgttcaccaatcattttaactaaatactcagacttagaagtcagatgcttcatgtcacagcatttagtttgttcaacagttgtttcttcagcttcctttgtccagtggaaaaacatgatttactggtctgacaagccaaaaatgttatatctgatattaaatacttaatgctgatttgaagagatagctgaaaccaaggctgaagactgttttactttcagtattttcttttcctcctagtgctatcattagtcacataatgaccttgattttattttaggagcttataaggcatgagacaatttccatataaatatattaattattgccacatactctaatatagattttggtggataattttgtgggtgtgcattttgttctgttttgttgggttttttgttttttttgtttttggcagggtcggtgggggggttggttggttggttggttttgtcggaacctaggcaaatgaccatattagtgaatctgttaatagttgtagcttgggatggttattgtagttgttttggtaaaatcttcatttcctggttttttttaccaccttatttaaatctcgattatctgctctctcttttatatacatacacacacccaaacataacatttataatagtgtggtagtggaatgtatccttttttaggtttccctgctttccagttaatttttaaaatggtagcgctttgtatgcatttagaatacatgactagtagtttatatttcactggtagtttaaatctggttggggcagtctgcagatgtttgaagtagtttagtgttctagaaagagctattactgtggatagtgcctaggggagtgctccacgccctctgggcatacggtagatattatctgatgaattggaaaggagcaaaccagaaatggctttattttctcccttggactaatttttaagtctcgattggaattcagtgagtaggttcataatgtgcatgacagaaataagctttatagtggtttaccttcatttagctttggaagttttctttgccttagttttggaagtaaattctagtttgtagttctcatttgtaatgaacacattaacgactagattaaaatattgccttcaagattgttcttacttacaagacttgctcctacttctatgctgaaaattgaccctggatagaatactataaggttttgagttagctggaaaagtgatcagattaataaatgtatattggtagttgaatttagcaaagaaatagagataatcatgattatacctttatttttacaggaagagatgatgtaactagagtatgtgtctacaggagtaataatggtttccaaagagtattttttaaaggaacaaaacgagcatgaattaactcttcaatataagctatgaagtaatagttggttgtgaattaaagtggcaccagctagcacctctgtgttttaagggtctttcaatgtttctagaataagcccttattttcaagggttcataacaggcataaaatctcttctcctggcaaaagctgctatgaaaagcctcagcttgggaagatagatttttttccccccaattacaaaatctaagtattttggcccttcaatttggaggagggcaaaagttggaagtaagaagttttattttaagtactttcagtgctcaaaaaaatgcaatcactgtgttgtatataatagttcataggttgatcactcataataattgactctaaggcttttattaagaaaacagcagaaagattaaatcttgaattaagtctggggggaaatggccactgcagatggagttttagagtagtaatgaaattctacctagaatgcaaaattgggtatatgaattacatagcatgttgttgggattttttttaatgtgcagaagatcaaagctacttggaaggagtgcctataatttgccagtagccacagattaagattatatcttatatatcagcagattagctttagcttagggggagggtgggaaagtttggggggggggttgtgaagatttagggggaccttgatagagaactttataaacttctttctctttaataaagacttgtcttacaccgtgcctgccattaaaggcagctgttctagagtttcagtcacctaagtacacccacaaaacaatatgaatatggagatcttcctttacccctcaactttaatttgcccagttatacctcagtgttgtagcagtactgtgatacctgggcacagtgctttgatcttacgatgccctctgtactgacctgaaggagacctaagagtcctttccctttttgagtttgaatcatagccttgatgtggtctcttgttttatgtccttgttcctaatgtaaaagtgcttaactgcttcttggttgtattgggtagcattgggataagattttaactgggtattcttgaattgcttttacaataaaccaattttataatctttaaatttatcaactttttacatttgtgttattttcagtcagggcttcttagatctacttatggttgatggagcacattgatttggagtttcagatcttccaaagcactatttgttgtaataacttttctaaatgtagtgcctttaaaggaaaaatgaacacagggaagtgactttgctacaaataatgttgctgtgttaagtattcatattaaatacatgccttctatatggaacatggcagaaagactgaaaaataacagtaattaattgtgtaattcagaattcataccaatcagtgttgaaactcaaacattgcaaaagtgggtggcaatattcagtgcttaacacttttctagcgttggtacatctgagaaatgagtgctcaggtggattttatcctcgcaagcatgttgttataagaattgtgggtgtgcctatcataacaattgttttctgtatcttgaaaaagtattctccacattttaaatgttttatattagagaattctttaatgcacacttgtcaaatatatatatatagtaccaatgttacctttttattttttgttttagatgtaagagcatgctcatatgttaggtacttacataaattgttacattattttttcttatgtaatacctttttgtttgtttatgtggttcaaatatattctttccttaaactcttaaaa

SEQ ID NO: 86 - DNA, 4526 bp, Homo sapiens
  misc_feature: Incyte ID No: 251776.11
  unsure 3982, 3984-4029, 4489-4490, 4492-4493, 4495-4497, 4501-4502,4506-4508, 4510-4512: a, t, c, g, or other
cgggggagtctcggcgctgggcgcgttcggagcccaagtcgcggccgccgagcggagccagcccctcccctacccggagcagcccgctgggtgcctgtcccgagcggcgacacacttaggagtcccggcctggccagccagggcagcctgcggtccctgggactcggccgtgagtgctgcgggacggatggtggcggcgggagcgcggagaccacggcgggcgccgtggagccgggcgccgtgcagccggagctgcgcgcggggcatgcggctgcgccccggcccctcggcccccggcctcggcccccgcgctccggccccagccccggccgccggcccccgcggagtgcagcgaccgcgccgccgctgagggaggcgccccaccatgccgcgggccccggcgccgctgtacgcctgcctcctggggctctgcgcgctcctgccccggctcgcaggtctcaacatatgcactagtggaagtgccacctcatgtgaagaatgtctgctaatccacccaaaatgtgcctggtgctccaaagaggacttcggaagcccacggtccatcacctctcggtgtgatctgagggcaaaccttgtcaaaaatggctgtggaggtgagatagagagcccagccagcagcttccatgtcctgaggagcctgcccctcagcagcaagggttcgggctctgcaggctgggacgtcattcagatgacaccacaggagattgccgtgaacctccggcccggtgacaagaccaccttccagctacaggttcgccaggtggaggactatcctgtggacctgtactacctgatggacctctccctgtccatgaaggatgacttggacaatatccggagcctgggcaccaaactcgcggaggagatgaggaagctcaccagcaacttccggttgggatttgggtcttttgttgataaggacatctctcctttctcctacacggcaccgaggtaccagaccaatccgtgcattggttacaagttgtttccaaattgcgtcccctcctttgggttccgccatctgctgcctctcacagacagagtggacagcttcaatgaggaagttcggaaacagagggtgtcccggaaccgagatgcccctgaggggggctttgatgcagtactccaggcagccgtctgcaaggagaagattggctggcgaaaggatgcactgcatttgctggtgttcacaacagatgatgtgccccacatcgcattggatggaaaattgggaggcctggtgcagccacacgatggccagtgccacctgaacgaggccaacgagtacactgcatccaaccagatggactatccatcccttgccttgcttggagagaaattggcagagaacaacatcaacctcatctttgcagtgacaaaaaaccattatatgctgtacaagaattttacagccctgatacctggaacaacggtggagattttagatggagactccaaaaatattattcaactgattattaatgcatacaatagtatccggtctaaagtggagttgtcagtctgggatcagcctgaggatcttaatctcttctttactgctacctgccaagatggggtatcctatcctggtcagaggaagtgtgagggtctgaagattggggacacggcatcttttgaagtatcattggaggcccgaagctgtcccagcagacacacggagcatgtgtttgccctgcggccggtgggattccgggacagcctggaggtgggggtcacctacaactgcacgtgcggctgcagcgtggggctggaacccaacagcgccaggtgcaacgggagcgggacctatgtctgcggcctgtgtgagtgcagccccggctacctgggcaccaggtgcgagtgccaggatggggagaaccagagcgtgtaccagaacctgtgccgggaggcagagggcaagccactgtgcagcgggcgtggggactgcagctgcaaccagtgctcctgcttcgagagcgagtttggcaagatctatgggcctttctgtgagtgcgacaacttctcctgtgccaggaacaagggagtcctctgctcaggccatggcgagtgtcactgcggggaatgcaagtgccatgcaggttacatcggggacaactgtaactgctcgacagacatcagcacatgccggggcagagatggccagatctgcagcgagcgtgggcactgtctctgtgggcagtgccaatgcacggagccgggggcctttggggagatgtgtgagaagtgccccacctgcccggatgcatgcagcaccaagagagattgcgtcgagtgcctgctgctccactctgggaaacctgacaaccagacctgccacagcctatgcagggatgaggtgatcacatgggtggacaccatcgtgaaagatgaccaggaggctgtgctatgtttctacaaaaccgccaaggactgcgtcatgatgttcacctatgtggagctccccagtgggaagtccaacctgaccgtcctcagggagccagagtgtggaaacacccccaacgccatgaccatcctcctggctgtggtcggtagcatcctccttgttgggcttgcactcctggctatctggaagctgcttgtcaccatccacgaccggagggagtttgcaaagtttcagagcgagcgatccagggcccgctatgaaatggcttcaaatccattatacagaaagcctatctccacgcacactgtggacttcaccttcaacaagttcaacaaatcctacaatggcactgtggactgatgtttccttctccgaggggctggagcggggatctgatgaaaaggtcagactgaaacgccttgcacggctgctcggcttgatcacagctccctaggtaggcaccacagagaagaccttctagtgagcctgggccaggagcccacagtgcctgtacaggaaggtgcctggccatgtcacctggctgctaggccagagccatgccaggctgcgtccctccgagcttgggataaagcaaggggaccttggcgctctcagctttccctgccacatccagcttgttgtcccaatgaaatactgagatgctgggctgtctctcccttccaggaatgctgggcccccagcctggccagacaagaagactgtcaggaagggtcggagtctgtaaaaccagcatacagtttggcttttttcacattgatcatttttatatgaaataaaaagatcctgcatttatggtgtagttctgagtcctgagacttttctgcgtgatggctatgccttgcacacaggtgttggtgatggggctgttgagatgcctgttgaaggtacatcgtttgcaaatgtcagtttcctctcctgtccgtgtttgtttagtacttttataatgaaaagaaacaagattgtttgggattggaagtaaagattaaaaccaaaagaatttgtgtttgtctgatactctctgtgtgtttctttctttctgagcggacttaaaatggtgcccccagtggggattgaagcggccgtgtacttcctcagggatgggacacaggctggtctgatactccagactgcagcttgtcaagtaagcatgaggtgctcggggcagtgagggctgtgcaagggggaacactgagcagatagatacctttggccccttccagcttttactgacagagagttccaggctagacaccataaaaaccaccccttggtctccctcccttgttctgaggggctgaggctggaaatagattgtacagacaagcaagggttgagtggtggttcccacacgaagtcatctcttaaacatcattagcaatagcagttcccttccaaggcctcccctcactcccgaaacacttacgtcccatgcaggcccaatgcaaaaaaacacatttgagcttttttcccgcagggccatgaagtccccttaagttcccatatctaagatggttgactgaccctctccccttatgnannnnnnnnnnnnnnnnnnnnnnnnnnnnnnnnnnnnnnnnnnnnnntgtttgttaggaggttactgaatgacaaactgttcctaagaccccatctcatgctggccagagggccagcctcctcattcctgcttgctcttagaaaatctttcactgatcattttttgtcactggaataacttcaaggttattatgctttcattccaaatggatctgtcctcagctctggacccaattccccttacttcattttggcaaacactaagtcaaatagtgaaatgcctgtcactacatagaacctattacctggggcaaatacgaacagattgagtttccttcatcttgtgtaaatatgatgaaacagagacctggtaacttggtgacactgttaaaccctttttgggataaagccaaatgtaaatgaaaacattaaacagataaattgtggcgttgagacttttctgaattgagaaaaataaatgtaattttggaagaaaaaaaaaaaaannannannngganncagnnnannnaaaaaaaaaaaggg

SEQ ID NO: 87 - DNA, 2204 bp, Homo sapiens
  misc_feature: Incyte ID No: 343674.9
ggccgcggcggctgcaggcggcgggcaaggacggccgggcacagcgcacagctgccccgctcgttggcccgggtatcccagcgcggacccacgcgatacgctgacgccccgacgccgatccggccgagccaagtaagggggacggcccgagacggagaagggagagagtgggagtttcccagcccgcagaactttcgaagttgagaagagaacccctggaacgtgcgctcagcactgggattttctggactcaacgatgactctgaataatgtcaccatgcgccagggcactgtgggcatgcagccacagcagcagcgctggagcatcccagctgatggcaggcatctgatggtccagaaagagccccaccagtacagccaccgcaaccgccattctgctacccctgaggaccactgccgccgaagctggtcctctgactccacagactcagtcatctcctctgagtcagggaacacctactaccgagtggtgctcataggggagcagggggtgggcaagtccactctggccaacatctttgcaggtgtgcatgacagcatggacagcgactgcgaggtgctgggagaagatacatatgaacgaaccctgatggttgatggggaaagtgcaacgattatactcctggatatgtgggaaaataagggggaaaatgaatggctccatgaccactgcatgcaggtcggggacgcatacctgattgtctactcaatcacagaccgagcgagcttcgagaaggcatctgagctgcgaatccagctccgcagggcccggcagacagaggacattcccataattttggttggcaacaaaagtgacttagtgcggtgccgagaagtgtctgtatcagaagggagagcctgtgcagtggtgtttgactgcaagttcatcgagacctctgcagctgtccagcacaacgtgaaggagctgtttgagggcattgtgcgacaggtgcgccttcggcgggacagcaaggagaagaatgaacggcggctggcctaccagaaaaggaaggagagcatgcccaggaaagccaggcgcttctggggcaagatcgtggccaaaaacaacaagaatatggccttcaagctcaagtccaaatcctgccatgacctctctgtactctaggaacccagggtcacccagatgtccctttgatggccgttgttgaaggccattgggaccaataatctatattagattgaatacttaagttagatgtggtttcccccattgtagcagggagctagcgtattagccttgtgggcaacatgatgcatgggaaatgaaagatttttgtaaaaagtcagtatttatttccaggaaaagcctgaccttggctatttgaacacccaagactctttagaggatgtgtttggtgttcacatgtgtttcttctattttggatagtagggaagtaaagcttacaaagaatgcctagaacaagaacttttcatcattaaaaatttttcccagtgttctgatatgtgactttgaggccaatgagtcataaacaaatataagaaagctgtcaatgagtttcttcaaaggagggaaaactttctacgaatctaagatccatggagctagaattgtagaactaggctcatcagaatcgtgactattattgctccatcaaactgtgaaaagaaatgatgtggaccttgctggaaacaaaggcttagcaaacaatttttgttcaatgcccaccgagacatatagaattgggaactgatacatgtgtcccttataggctcaaaaattatatcttacaatttcttatttagggggaaattatttgaatcagattctatttagtcaaaccaccttttatgttttattatttttgaattcatggagccatcataaaaatatttttaaaatcagaattattgataccctgtagtgcaaaatgtcaatttttaatgtataatcagaagtctgaattttcataaaacatatagcataaaaacctccagtacttgggttgacccttgtatgtcacagctctgctctatttattattattttgcaaaataaccattttaacatttgataaagcatatttatgaacatatttcttaataagaaaaatatccattttattaccattttctatctttttcaaaatatgcaagtttttacctatatgtcttataataaaagaaataaaatatttgaaaaa

SEQ ID NO: 88 - DNA, 4015 bp, Homo sapiens
  misc_feature: Incyte ID No: 479136.1
  unsure 200-218, 2456-2486, 4006, 4010: a, t, c, g, or other
agggccctgcgcgggtagctggttggctcctggtgctctccacccccggccgccctcgtacccaccagagcctgggctctgtcaaggagcggggcatggcatcgaacagcatcttcgactccttcccgacctactcgccgaccttcaaccgcgacccaagcaccagccgccgcttcacacctccctccccggccttcccnnnnnnnnnnnnnnnnnnnaagatgggcgagaacagcggcgcgctgagcgcgcaggcggccgtggggcccggagggcgcgcccggcccgaggtgcgctcgatggtggacgtgctggcggaccacgcaggcgagctcgtgcgcaccgacagccccaacttcctctgctccgtgctgccctcgcactggcgctgcaacaagacgctgcccgtcgccttcaaggtggtggcattgggggacgtgccggatggtacggtggtgactgtgatggcaggcaatgacgagaactactccgctgagctgcgcaatgcctcggccgtcatgaagaaccaggtggccaggttcaacgaccttcgcttcgtgggccgcagtgggcgagggaagagtttcaccctgaccatcactgtgttcaccaaccccacccaagtggcgacctaccaccgagccatcaaggtgaccgtggacggaccccgggagcccagacggcaccggcagaagctggaggaccagaccaagccgttccctgaccgctttggggacctggaacggctgcgcatgcgggtgacaccgagcacacccagcccccgaggctcactcagcaccacaagccacttcagcagccagccccagaccccaatccaaggcacctcggaactgaacccattctccgacccccgccagtttgaccgctccttccccacgctgccaaccctcacggagagccgcttcccagaccccaggatgcattatcccggggccatgtcagctgccttcccctacagcgccacgccctcgggcacgagcatcagcagcctcagcgtggcgggcatgccggccaccagccgcttccaccatacctacctcccgccaccctacccgggggccccgcagaaccagagcgggcccttccaggccaacccgtccccctaccacctctactacgggacatcctctggctcctaccagttctccatggtggccggcagcagcagtgggggcgaccgctcacctacccgcatgctggcctcttgcaccagcagcgctgcctctgtcgccgccggcaacctcatgaaccccagcctgggcggccagagtgatggcgtggaggccgacggcagccacagcaactcacccacggccctgagcacgccaggccgcatggatgaggccgtgtggcggccctactgaccgccctggtggactcctcccgctggaggcggggaccctaacaaccttcaagaccagtgatgggccggctccgaggctccgggcgggaatgggacctgcgctccagggtggtctcggtcccagggtggtcccagctggtgggagcctctggctgcatctgtgcagccacatccttgtacagaggcataggttaccacccccaccccggcccgggatactgcccccggcccagatcctggccgtctcatcccatacttctgtggggaatcagcctcctgccacccccccggaaggacctcactgtctccagctatgcccagtgctgcatgggacccatgtctcctgggacagaggccatctctcttccagagagaggcagcattggcccacaggataagcctcaggccctgggaaacctcccgacccctgcaccttcgttggagcccctgcatcccctgggtccagccccctctgcatttacacagatttgagtcagaactgggaaagtgtcccccacccccaccaccctcgagcggggttcccctcattgtacagatggggcaggacccagcacgctgctggcagagatggtttgagaacacatccaagccagtccccccagcccagcttcccctccgttcctaactgttggctttcccccagccgcacgggtcccaggccccagagaagatgagtctatggcatcaggttcttaaacccaggaaagcacctacagaccggctcctccatgcactttaccagctcaacgcatccactctctgttctcttggcagggcgggggaggggggataggaggtcccctttcccctaggtggtctcataattccatttgtggagagaacaggagggccagatagataggtcctagcagaaggcattgaggtgagggatcattttgggtcagacatcaatgtccctgtcccccctgggtccagccaagctgtgccccatcccccaagcctcctgggaggatccagccaaatcttgcgactcctggcacacacctgtctgtaacctgttttgtgctctgaaagcaaatagtcctgagcnnnnnnnnnnnnnnnnnnnnnnnnnnnnnnnaaaaacaaaacagtttttaaaactgattttagaaaaagaagcttaatctaacgttttcaaacacaaggtctcttacaggtatagttccgtgattatgatagctctgtgattataagcaacatccccgccccctctcccccccgcggacccccagctgcctcctgagggtgtggggttattagggtctcaatactttctcaaggggctacactccccatcaggcagcatcccaccagcctgcaccacaggctcccctgggaggacgagggaaacgctgatgagacgctgggcatctctcctctgtggctctaggacatctgtccaggaggctgggcggaggtgggcaggatgtgagaggtggggagtactggctgtgcgtggcaggacagaagcactgtaaagggctctccagccgcagctcagctgcactgcgttccgaggtgaagtcttgcccctgaattttgcaaaatgggaaagtgggcgcttgcccaagggccaggctgcatggattctcacatcagagttctctggccctagaaaggcttagaaaaggcgtaagggaactcataaaggctagcagcatgcggtattttaactttctgcctcggcctctgtggatgcagaaatctgccctacaaaatgctcttcattggttgtctctgtgagagcactgtccccacccaacctgtcacaacggccagaaccatacaccagagacacactggcaggttaggcagtccttctggtgatcctattccattccctcctgctgcggtttctcttggcctgtcctcactggaaaaacagtctccatctcctcaaaatagttgctgactccctgcacccaaggggcctctccatgccttcttaggaagcagctatgaatccattgtccttgtagtttcttccctcctgttctctggttatagctggtcccaggtcagcgtgggaggcacctttgggttcccagtgcccagcactttgtagtctcatcccagattactaacccttcctgatcctggagaggcagggatagtaaataaattgctcttcctaccccatcccccatcccctgacaaaaagtgacggcagccgtactgagtctgtaaggcccaaagtgggtacagacagcctgggctggtaaaagtaggtccttatttacaaggctgcgttaaagttgtactaggcaaacacactgatgtaggaagcacgaggaaaggaagacgttttgatatagtgttactgtgagcctgtcagtagtgggtaccaatcttttgtgacatattgtcatgctgaggtgtgacacctgctgcactcatctgatgtaaaaccatcccagagctggcgagaggatggagctgggtggaaactgctttgcactatcgtttgcttggtgtttgtttttaacgcacaacttgcttgtacagtaaactgtcttctgtactatttaactgtaaaatggaattttgactgatttgttacaataatataactctgagatgtgtggaaaaaaaaaaaanaganaagag

SEQ ID NO: 89 - DNA, 2570 bp, Homo sapiens
  misc_feature: Incyte ID No: 1078147.1
ggcgccgcatgtgtctccgcggcggctgcagccctcgagcgcccgccgccgcgccccaaccccggccgccgcccgccctcccgccccggcctcgcgcccccgtcccggcctcgcgccccggccgccctttgttgacgccggccaggccgtgcggtcggatgcgccgcggcagccccgggccccggctcggaggctcccggggcgagaggaggcggcccgccggccgggaccccgcgcgagtcggccccggccaggggctgcgtaggcccgcccggccaggcccagccgcctggacagagacagggcagggcattgttcatgcactgaccgacctcagcagccccggcatgacctcagggaacggaaactctgcctccagcatcgccggcactgccccccagaatggtgagaataaaccaccacaggccattgtgaaaccccaaatcctgacgcatgttatcgaagggtttgtgatccaggagggggcggagcctttcccggtgggacgctcgtccctgctggtggggaatctcaagaagaagtatgcacaggggttcctgcctgagaaacttccacagcaggatcacaccaccaccactgactcggagatggaggagccctatctgcaagaatccaaagaggagggtgctcccctcaaactcaagtgtgagctctgtggccgggtggactttgcctataagttcaagcgttccaagcgcttctgttccatggcttgtgcaaagaggtacaacgtgggatgcaccaaacgggtgggacttttccactcagaccggagcaagctgcagaaggcaggagctgcgacccacaaccgccgtcgggccagcaaagccagtctgccaccacttaccaaggataccaagaagcagccaacaggcactgtgcccctttcggttactgctgctttgcagctaacacacagccaggaagactccagccgttgctcagataactcaagctatgaggaacccttgtcacccatctcagccagctcatctacttcccgccggcgacaaggccagcgggacctggagctccccgacatgcatatgcgggacctggtgggcatgggacaccacttcctgccaagtgagcccaccaagtggaatgtagaagacgtctacgaattcatccgctctctgccaggctgccaggagatagcagaggaattccgtgcccaggaaatcgacgggcaagccctgctgctgctcaaggaggaccacctgatgagcgccatgaacatcaagctggggcccgccctgaagatctacgcccgcatcagcatgctcaaggactcctagggctggtggcagccaggattctggcccagggcgcctcctcccgactgagcagagccagacagacattcctgaggggcccagaaatggggccggttggagggcaggggctctccctaggggcatagctggtgaggaggtctgggcacctcctccatggctctcaggggcctttcatttctgtgggaggggcagagaggtaggtggcacagaagatggggctttatgcttgtaaatattgatagcactggcttcctccaaagtcccaatactctagccccgctctcttcccctctttctgtcccccattttccagggggtatatggtcagggctccccaacctgagttgggttacttcaagggcagccagcaggcctggatggaggcctagaaagcccttgccttccttcctcccacttctttctccaggcctggttaactcttccgttgtcagcttctcccccttcagcctgtttctgcagcagccagggttctcccccctacaaccctctgcaaggtggagagagagaagctgggcccagccgggccgtgcctgctggcacagacgccttaacgctgtgtgtatgactgtgtgactgtgtgggagcctggactgacagataggccaagggctactctctggcatctccaggtgttttgtagcaaacagccacttagtgctttgtcctggactccactcagcctcaggatggggaatagccaagaatggcagcctcagcgcagaggcaaggtcagaaagagacggcgcttcagagtttcctttccagacacccctccccgcactgtgaagttcccctgaccgccctcctggttcacaaagagcattaagaaagctgcggtggtctgagcaacatagcccagagggctgagcctcctggcctgcctgcccgcccaccctgggagtcccagtggtgaggctcagagaacttctaaggggaaagaacagctggagtttctgttgatgtgaagaaggcagctcttggcctcccactcccacacttctttgcctataaatcttcctagcagcaatttgagctacctgaggaggaggcagggcagaaagggcaagggcctgcctctgacctgccgtgtcctttgcaggaaggaggtaggcacctttctgagcttattctattccccacccacacccccaggcagggttggaaatgaaggacttttttaacctttgttttgttttttaaaaataaatctgtaaaatctgaaaaaaaaaa

SEQ ID NO: 90 - DNA, 5848 bp, Homo sapiens
  misc_feature: Incyte ID No: 474275.1
tcctctgccactggctctgcgccccagcccggctctgctgcagcggcagggaggaagagccgccgcagcgcgactcgggagccccgggccacagcctggcctccggagccacccacaggcctccccgggcggcgcccacgctcctaccgcccggacgcgcggatcctccgccggcaccgcagccacctgctcccggcccagaggcgacgacacgatgcgctgcgcgctggcgctctcggcgctgctgctactgttgtcaacgccgccgctgctgccgtcgtcgccgtcgccgtcgccgtcgccgtcgccctcccagaatgcaacccagactactacggactcatctaacaaaacagcaccgactccagcatccagtgtcaccatcatggctacagatacagcccagcagagcacagtccccacttccaaggccaacgaaatcttggcctcggtcaaggcgaccacccttggtgtatccagtgactcaccggggactacaaccctggctcagcaagtctcaggcccagtcaacactaccgtggctagaggaggcagctcaggcaaccctactaccaccatcgagagccccaagagcacaaaaagtgcagacaccactacagttgcaacctccacagccacagctaaacctaacaccacaagcagccagaatggagcagaagatacaacaaactctggggggaaaagcagccacagtgtgaccacagacctcacatccactaaggcagaacatctgacgacccctcaccctacaagtccacttagcccccgacaacccacttcgacgcatcctgtggccaccccaacaagctcgggacatgaccatcttatgaaaatttcaagcagttcaagcactgtggctatccctggctacaccttcacaagcccggggatgaccaccaccctaccgtcatcggttatctcgcaaagaactcaacagacctccagtcagatgccagccagctctacggccccttcctcccaggagacagtgcagcccacgagcccggcaacggcattgagaacacctaccctgccagagaccatgagctccagccccacagcagcatcaactacccaccgataccccaaaacaccttctcccactgtggctcatgagagtaactgggcaaagtgtgaggatcttgagacacagacacagagtgagaagcagctcgtcctgaacctcacaggaaacaccctctgtgcagggggcgcttcggatgagaaattgatctcactgatatgccgagcagtcaaagccaccttcaacccggcccaagataagtgcggcatacggctggcatctgttccaggaagtcagaccgtggtcgtcaaagaaatcactattcacactaagctccctgccaaggatgtgtacgagcggctgaaggacaaatgggatgaactaaaggaggcaggggtcagtgacatgaagctaggggaccaggggccaccggaggaggccgaggaccgcttcagcatgcccctcatcatcaccatcgtctgcatggcgtcattcctgctcctcgtggcggccctctatggctgctgccaccagcgcctctcccagaggaaggaccagcagcggctaacagaggagctgcagacagtggagaatggttaccatgacaacccaacactggaagtgatggagacctcttctgagatgcaggagaagaaggtggtcagcctcaacggggagctgggggacagctggatcgtccctctggacaacctgaccaaggacgacctggatgaggaggaagacacacacctctagtccggtctgccggtggcctccagcagcaccacagagctccagaccaaccaccccaagtgccgtttggatggggaagggaaagactggggagggagagtgaactccgaggggtgtcccctcccaatccccccagggccttaatttttcccttttcaacctgaacaaatcacattctgtccagattcctcttgtaaaataacccactagtgcctgagctcagtgctgctggatgatgagggagatcaagaaaaagccacgtaagggactttatagatgaactagtggaatcccttcattctgcagtgagattgccgagacctgaagagggtaagtgacttgcccaaggtcagagccacttggtgacagagccaggatgagaacaaagattccatttgcaccatgccacactgctgtgttcacatgtgccttccgtccagagcagtcccgggcaggggtgaaactccagcaggtggctgggctggaaaggagggcagggctacatcctggctcggtgggatctgacgacctgaaagtccagctcccaagttttccttctcctaccccagcctcgtgtacccatcttcccaccctctatgttcttacccctccctacactcagtgtttgttcccacttactctgtcctggggcctctgggattagcacaggttattcataaccttgaaccccttgttctggattcggattttctcacatttgcttcgtgagatgggggcttaacccacacaggtctccgtgcgtgaaccaggtctgcttaggggacctgcgtgcaggtgaggagagaaggggacactcgagtccaggctggtatctcagggcagctgatgaggggtcagcaggaacactggcccattgcccctggcactccttgcagaggccacccacgatcttctttgggcttccatttccaccagggactaaaatctgctgtagctagtgagagcagcgtgttccttttgttgttcactgctcagctgatgggagtgattccctgagacccagtatgaaagagcagtggctgcaggagaggccttcccggggccccccatcagcgatgtgtcttcagagacaatccattaaagcagccaggaaggacaggctttcccctgtatatcataggaaactcagggacatttcaagttgctgagagttttgttatagttgttttctaacccagccctccactgccaaaggccaaaagctcagacagttggcagacgtccagttagctcatctcactcactctgattctcctgtgccacaggaaaagagggcctggaaagcgcagtgcatgctgggtgcatgaagggcagcctgggggacagactgttgtgggaacgtcccactgtcctggcctggagctaggccttgctgttcctcttctctgtgagcctagtggggctgctgcggttctcttgcagtttctggtggcatctcaggggaacacaaagctatgtctattccccaatataggacttttatgggctcggcagttagctgccatgtagaaggctcctaagcagtgggcatggtgaggtttcatctgattgagaagggggaatcctgtgtggaatgttgaactttcgccatggtctccatcgttctgggcgtaaattccctgggatcaagtaggaaaatgggcagaactgcttaggggaatgaaattgccatttttcgggtgaaacgccacacctccagggtcttaagagtcaggctccggctgtagtagctctgatgaaataggctatccactcgggatggcttactttttaaaagggtagggggaggggctggggaagatctgtcctgcaccatctgcctaattccttcctcacagtctgtagccatctgatatcctaggggaaaaggaaggccaggggttcacatagggccccagcgagtttcccaggagttagagggatgcgaggctaacaagttccaaaaacatctgccccgatgctctagtgtttggaggtgggcaggatggagaacagtgcctgtttgggggaaaacaggaaatcttgttaggcttgagtgaggtgtttgcttccttcttgcccagcgctgggttctctccacccagtaggttttctgttgtggtcccgtgggagaggccagactggattattcctcctttgctgatcctgggtcacacttcaccagccagggcttttgacggagacagcaaataggcctctgcaaatcaatcaaaggctgcaaccctatggcctcttggagacagatgatgactggcaaggactagagagcaggagtgcctggccaggtcggtcctgactctcctgactctccatcgctctgtccaaggagaacccggagaggctctgggctgattcagaggttactgctttatattcgtccaaactgtgttagtctaggcttaggacagcttcagaatctgacaccttgccttgctcttgccaccaggacacctatgtcaacaggccaaacagccatgcatctataaaggtcatcatcttctgccacctttactgggttctaaatgctctctgataattcagagagcattgggtctgggaagaggtaagaggaacactagaagctcagcatgacttaaacaggttgtagcaaagacagtttatcatcaactctttcagtggtaaactgtggtttccccaagctgcacaggaggccagaaaccacaagtatgatgactaggaagcctactgtcatgagagtggggagacaggcagcaaagcttatgaaggaggtacagaatattctttgcgttgtaagacagaatacgggtttaatctagtctaggcaccagattttttttcccgcttgataaggaaagctagcagaaagtttatttaaaccacttcttgagctttatcttttttgacaatatactggagaaactttgaagaacaagttcaaactgatacatatacacatatttttttgataatgtaaatacagtgaccatgttaacctaccctgcactgctttaagtgaacatactttgaaaaagcattatgttagctgagtgatggccaagttttttctctggacaggaatgtaaatgtcttactggaaatgacaagtttttgcttgatttttttttttaaacaaaaaatgaaatataacaagacaaacttatgataaagtatttgtcttgtagatcaggtgttttgttttgtttttttaattttaaaatgcaaccctgccccctccccagcaaagtcacagctccatttcagtaaaggttggagtcaatatgctctggttggcaggcaaccctgtagtcatggagaaaggtatttcaagatctagtccaatctttttctagagaaaaagataatctgaagctcacaaagatgaagtgacttcctcaaaatcacatggttcaggacagaaacaagattaaaacctggatccacagactgtgcgcctcagaaggaataatcggtaaattaagaattgctactcgaaggtgccagaatgacacaaaggacagaattcctttcccagttgttaccctagcaaggctagggagggcatgaacacaaacataagaactggtcttctacactttctctgaatcatttaggtttaagatgtaagtgaacaattctttctttctgccaagaaacaaagttttggatgagcttttatatatggaacttactccaacaggactgagggaccaaggaaacatgatgggggaggcagagagggcaagagtaaaactgtagcatagcttttgtcacggtcactagctgatccctcaggtctgctgcaaacacagcatggaggacacagatgactctttggtgttggtctttttgtctgcagtgaatgttcaacagtttgcccaggaactgggggatcatatatgtcttagtggacaggggtctgaagtacactggaatttactgagaaacttgtttgtaaaaactatagttaataattattgcattttcttacaaaaatatattttggaaaattgtatactgtcaattaaagtgtttttgtgtaaactggtt

SEQ ID NO: 91 - DNA, 2700 bp, Homo sapiens
  misc_feature: Incyte ID No: 1320658
  unsure 2495, 2497, 2498, 2510-2525, 2587, 2610, 2687: a, t, c, g, or other
cccgccgcccatggagcgcgccgcgccgtcgcgccgggtcccgcttccgctgctgctgctcggcggccttgcgctgctggcggccggagtggacgcggatgtcctcctggaggcctgctgtgcggacggacaccggatggccactcatcagaaggactgctcgctgccatatgctacggaatccaaagaatgcaggatggtgcaggagcagtgctgccacagccagctggaggagctgcactgtgccacgggcatcagcctggccaacgagcaggaccgctgtgccacgccccacggtgacaacgccagcctggaggccacatttgtgaagaggtgctgccattgctgtctgctggggagggcggcccaggcccagggccagagctgcgagtacagcctcatggttggctaccagtgtggacaggtcttccgggcatgctgtgtcaagagccaggagaccggagatttggatgtcgggggcctccaagaaacggataagatcattgaggttgaggaggaacaagaggacccatatctgaatgaccgctgccgaggaggcgggccctgcaagcagcagtgccgagacacgggtgacgaggtggtctgctcctgcttcgtgggctaccagctgctgtctgatggtgtctcctgtgaagatgtcaatgaatgcatcacgggcagccacagctgccggcttggagaatcctgcatcaacacagtgggctctttccgctgccagcgggacagcagctgcgggactggctatgagctcacagaggacaatagctgcaaagatattgacgagtgtgagagtggtattcataactgcctccccgattttatctgtcagaatactctgggatccttccgctgccgacccaagctacagtgcaagagtggctttatacaagatgctctaggcaactgtattgatatcaatgagtgtttgagtatcagtgccccgtgccctattgggcatacatgcatcaacacagagggctcctacacgtgccagaagaacgtgcccaactgtggccgtggctaccatctcaacgaggagggaacgcgctgtgttgatgtggacgagtgcgcgccacctgctgagccctgtgggaagggacatcgctgcgtgaactctcccggcagtttccgctgcgaatgcaagacgggttactattttgacggcatcagcaggatgtgtgtcgatgtcaacgagtgccagcgctaccccgggcgcctgtgtggccacaagtgcgagaacacgctgggctcctacctctgcagctgttccgtgggcttccggctctctgtggatggcaggtcatgtgaagacatcaatgagtgcagcagcagcccctgtagccaggagtgtgccaacgtctacggctcctaccagtgttactgccggcgaggctaccagctcagcgatgtggatggagtcacctgtgaagacatcgacgagtgcgccctgcccaccgggggccacatctgctcctaccgctgcatcaacatccctggaagcttccagtgcagctgcccctcgtctggctacaggctggcccccaatggccgcaactgccaagacattgatgagtgtgtgactggcatccacaactgctccatcaacgagacctgcttcaacatccagggcgcgttccgctgcctggccttcgagtgccctgagaactaccgccgctccgcagccacgctccagcaggagaagacagacacggtccgctgcatcaagtcctgccgccccaacgatgtcacatgcgtgttcgaccccgtgcacaccatctcccacaccgtcatctcgctgcctaccttccgcgagttcacccgccctgaagagatcatcttcctccgggccatcacgccaccgcatcctgccagccaggctaacatcatcttcgacatcacggaagggaacctgcgggactcttttgacatcatcaagcgttacatggacggcatgaccgtgggtgtcgtgcgccaggtgcggcccatcgtgggcccatttcatgccgtcctgaagctggagatgaactatgtggtcgggggcgtggtttcccaccgaaatgttgtcaacgtccgcatcttcgtctctgagtactggttctgagggctggtctgccgcacagccgcaggtgcacctccaggccaaatcattgctgccagtgactgtggtctgtacttgtttataccctcagacttttttaatgttaggtatttgtagcataaggccaacatgtatcaagctgagccagatgaataagtccatctgatgtattttcggtgtttaaaaaatgagcccagttgctcaactgtttggttgaaaaccttgctcattttttaatgcgaaggctaagtgtcaccccctttctctgcctctggctgggccttgctaagggcccaaggaaagaaagacattttttagggggcagccagtccaaatgccaaaagaagaccagttcttgccctgattgtatgaaatntnncattttggcacnnnnnnnnnnnnnnnnggccaatcagattttctatgttctaaggacatggctgctgtagaatagcacagacgtggatnataaattatccccagaagcagcntgacagaatgcctcggggagcacttggaagggaaattgcagttctgttggggaatggctgggatttctcggcactntgcatcatccatct

SEQ ID NO: 92 - DNA, 4481 bp, Homo sapiens
  misc_feature: Incyte ID No: 242114.16
cgaccactgtgagcccgcggcgtgacgcgtgggaggaagcgcggctgctgtcgcccagcgccgccccgtcgtcgtctgccttcgcttcacggcgccgagccgcggtccgagcagaactggggctcccttgcatcttccagttacaaattcagtgccttctgcagtttccccagagctcctcaagaataacggaagggagaatatgacagatacctagcatctagcaaaataatggcagctgcttaccttgaccccaacttgaatcacacaccaaattcgagtactaagactcacctgggtactggtatggaacgttctcctggtgcaatggagcgagtattaaaggtctttcattattttgaaagcaatagtgagccaaccacctgggccagtattatcaggcatggagatgctactgatgtcaggggcatcattcagaagatagtggacagtcacaaagtaaagcatgtggcctgctatggattccgcctcagtcacctgcggtcagaggaggttcactggcttcacgtggatatgggcgtctccagtgtgagggagaagtatgagcttgctcacccaccagaggagtggaaatatgaattgagaattcgttatttgccaaaaggatttctaaaccagtttactgaagataagccaactttgaatttcttctatcaacaggtgaagagcgattatatgttagagatagctgatcaagtggaccaggaaattgctttgaagttgggttgtctagaaatacggcgatcatactgggagatgcggggcaatgcactagaaaagaagtctaactatgaagtattagaaaaagatgttggtttaaagcgattttttcctaagagtttactggattctgtcaaggccaaaacactaagaaaactgatccaacaaacatttagacaatttgccaaccttaatagagaagaaagtattctgaaattctttgagatcctgtctccagtctacagatttgataaggaatgcttcaagtgtgctcttggttcaagctggattatttcagtggaactggcaatcggcccagaagaaggaatcagttacctaacggacaagggctgcaatcccacacatcttgctgacttcactcaagtgcaaaccattcagtattcaaacagtgaagacaaggacagaaaaggaatgctacaactaaaaatagcaggtgcacccgagcctctgacagtgacggcaccatccctaaccattgcggagaatatggctgacctaatagatgggtactgccggctggtgaatggaacctcgcagtcatttatcatcagacctcagaaagaaggtgaacgggctttgccatcaataccaaagttggccaacagcgaaaagcaaggcatgcggacacacgccgtctctgtgtcagaaacagatgattatgctgagattatagatgaagaagatacttacaccatgccctcaaaaagctatggaatagatgaagccagggattatgagattcaaagagaaagaatagaacttggacgatgtattggagaaggccaatttggagatgtacatcaaggcatttatatgagtccagagaatccagctttggcggttgcaattaaaacatgtaaaaactgtacttcggacagcgtgagagagaaatttcttcaagaagccttaacaatgcgtcagtttgaccatcctcatattgtgaagctgattggagtcatcacagagaatcctgtctggataatcatggagctgtgcacacttggagagctgaggtcatttttgcaagtaaggaaatacagtttggatctagcatctttgatcctgtatgcctatcagcttagtacagctcttgcatatctagagagcaaaagatttgtacacagggacattgctgctcggaatgttctggtgtcctcaaatgattgtgtaaaattaggagactttggattatcccgatatatggaagatagtacttactacaaagcttccaaaggaaaattgcctattaaatggatggctccagagtcaatcaattttcgacgttttacctcagctagtgacgtatggatgtttggtgtgtgtatgtgggagatactgatgcatggtgtgaagccttttcaaggagtgaagaacaatgatgtaatcggtcgaattgaaaatggggaaagattaccaatgcctccaaattgtcctcctaccctctacagccttatgacgaaatgctgggcctatgaccccagcaggcggcccaggtttactgaacttaaagctcagctcagcacaatcctggaggaagagaaggctcagcaagaagagcgcatgaggatggagtccagaagacaggccacagtgtcctgggactccggagggtctgatgaagcaccgcccaagcccagcagaccgggttatcccagtccgaggtccagcgaaggattttatcccagcccacagcacatggtacaaaccaatcattaccaggtttctggctaccctggttcacatggaatcacagccatggctggcagcatctatccaggtcaggcatctcttttggaccaaacagattcatggaatcatagacctcaggagatagcaatgtggcagcccaatgtggaggactctacagtattggacctgcgagggattgggcaagtgttgccaacccatctgatggaagagcgtctaatccgacagcaacaggaaatggaagaagatcagcgctggctggaaaaagaggaaagatttctgaaacctgatgtgagactctctcgaggcagtattgacagggaggatggaagtcttcagggtccgattggaaaccaacatatatatcagcctgtgggtaaaccagatcctgcagctccaccaaagaaaccgcctcgccctggagctcccggtcatctgggaagccttgccagcctcagcagccctgctgacagctacaacgagggtgtcaagccatggaggcttcagccccaggaaatcagcccccctcctactgccaacctggaccggtcgaatgataaggtgtacgagaatgtgacgggcctggtgaaagctgtcatcgagatgtccagtaaaatccagccagccccaccagaggagtatgtccctatggtgaaggaagtcggcttggccctgaggacattattggccactgtggatgagaccattcccctcctaccagccagcacccaccgagagattgagatggcacagaagctattgaactctgacctgggtgagctcatcaacaagatgaaactggcccagcagtatgtcatgaccagcctccagcaagagtacaaaaagcaaatgctgactgctgctcacgccctggctgtggatgccaaaaacttactcgatgtcattgaccaagcaagactgaaaatgcttgggcagacgagaccacactgagcctcccctaggagcacgtcttgctaccctcttttgaagatgttctctagccttccaccagcagcgaggaattaaccctgtgtcctcagtcgccagcacttacagctccaacttttttgaatgaccatctggttgaaaaatctttctcatataagtttaaccacactttgatttgggttcattttttgttttgtttttttcaatcatgatattcagaaaaatccaggatccaaaatgtggcgtttttctaagaatgaaaattatatgtaagcttttaagcatcatgaagaacaatttatgttcacattaagatacgttctaaagggggatggccaaggggtgacatcttaattcctaaactaccttagctgcatagtggaagaggagagcatgaagcaaagaattccaggaaacccaagaggctgagaattcttttgtctaccatagaattattatccagactggaatttttgtttgttagaacacccttcagttgcaatatgctaatcccactttacaaagaatataaaagctatattttgaagacttgagttatttcagaaaaaactacagccctttttgtcttacctgccttttactttcgtgtggatatgtgaagcattgggtcgggaactagctgtagaacacaactaaaaactcatgtcttttttcacagaataatgtgccagttttttgtagcaatgatatttctcttggaagcagaaatgctttgtaccagagcacctccaaactgcattgaggagaagttccagaaccatcccctttttccatttttatataatttataaagaaagattaaagccatgttgactattttacagccactggagttaactaacccttccttgtatctgtcttcccaggagagaatgaagcaaaacaggaatttggttttcttttgatgtccagttacaccatccattctgttaattttgaaaaaatataccctccctttagtttgttgggggatataaattattctcaggaagaatataatgaactgtacagttactttgacctattaaaaaggtgttaccagt

SEQ ID NO: 93 - DNA, 5032 bp, Homo sapiens
  misc_feature: Incyte ID No: 445186.7
  unsure 5019: a, t, c, g, or other
gggcgggggaatatacaaagtgaagccacattgccaaacttgcagcagcgattgcagcagttgctgccgctgcgccgcgcctgaagccgcgccgcgcgggccgagggctcctgcagctgctcgcgcgcagtcggaggcggagaaggacgaagactgagactgacacttctgctcccggccgcccggcacttacgcgggggccccccaacccgccccagagcaacgcgatttaaaaaaaaaaaaaaagccgcccttagccccctcctcccctttcctgcttctgcgagaactccctccctccctccagcttccgccagcccaggcgccccttccctggaagccgagcggcttcgctcgcatttcaccgccgccgcctctcgcaatattgcaatataggggaaaagcagaccatggtgaatccgggcagcagctcgcagccgcccccggtgacggccggctccctctcctggaagcggtgcgcaggctgcgggggcaagattgcggaccgctttctgctctatgccatggacagctattggcacagccggtgcctcaagtgctcctgctgccaggcgcagctgggcgacatcggcacgtcctgttacaccaaaagtggcatgatcctttgcagaaatgactacattaggttatttggaaatagcggtgcttgcagcgcttgcggacagtcgattcctgcgagtgaactcgtcatgagggcgcaaggcaatgtgtatcatcttaagtgttttacatgctctacctgccggaatcgcctggtcccgggagatcggtttcactacatcaatggcagtttattttgtgaacatgatagacctacagctctcatcaatggccatttgaattcacttcagagcaatccactactgccagaccagaaggtctgctaaaaggtcagagtaatgcagaatgcgtgccttcatctcagatttgttcatcacaggtggatcccatgtgtcttcagtagacaagtcacctttgtagctagcaccagtgccagctccatgccattgcaccttctttagtcttgattgcccttcccgcatttattggtgtattaaaatgactgaatatgaacattaaggactccatgaacctgggctaatgggagactgtagagaaaatgaaaaaagatccaccagaggacatcttggggagggggagggagctgggggggagggaaatgactaatgaagctaattaaaagaagcattcaaatctgctttctaccctcattaacaattagcagggcactggccagagtttgtaccctgtgttttaccttaacaacattctatttgctctttgtatatttaagtgttgtaaggaaacgtgtttcaatcaaaactgaccatgagataaaggaaagagatgtggcttttgtgatattctatcacaaacacttattgtatctctgtaaaatacaatgtatgtatgcatgtaagtgtttttgtcctaatgttgctactcccatggcaaagaaaaaaaaaagaatgaaaaaaagaaaaaaatttggaaaaaaaaatcaggctcatagcagctactgtgtagaaaattccccctacttctaatttgctgaatgaagaaaaaaaaaaatcttttatttgtgatattttcagagacatttgctctagtatggtgtatttaaataataaaaacttaaaagaaaaaatatttaatggtgtttgggtttaaacactgctttttctcttctgtattttgaagaaatttagtttttattgttgttgaataacaagctcactttaaatttgaaggagttgagggaggtggagtgtatatttatttagctctgggccagtaaggtattcttcaaattacttaaccacgccattattggcaggggtacaaagtagtttctaacagggtcctttctataagtcaagaatattctgttaacagcatttcgttacacttctatatcacagtaagtcttttgtgtttataaatacttgagtgtccactattttgtttattctttttctcaatagcaaacaaagccttgggtattgatgaaaagtatgtataaaaaaaaatacggcacaaccatcctgttctcttattgagtttatagcttttgaaggaagtcacaatttctaagtcatacctgtacatattttgaagctcacttagttgtagggacccagagctctttttttatggtgatctttgattggtgaagtagccatttcctggtgacccttaggctcgtgtggttggctgtaaggtgtttattttgttttgctcctacacttctttactgactgcgtttccgtatgtattttgggggaagattctgacttcatttagtcttagtcttgagatactgagttgctggttgcaggcagcagagtgtccaccacagtgcctgcactgcccgcagagctgccctccggaaagcatgcagtataacagctagtgctggaaggaggaaaaccaaataggcctggaggctgaggttgtactgccagcttccttagatgtgagcaaatttcaactacaacttccatcacaggctaataaaaccaggtgtgtgaacgctactattttaaattttcttttttaagatggcattttattttgttccagaaaagcgcctgatgtagaccctccctctgagaatagccgtggagccatgtagagaggtgtagctcagcacatctcaactaccagtcagcttccctttgagaacttctgtgctcacttcctgttttcagagattccagggcaggggaaaaaaaaaatcagttgaacttcaaacctcctagaggagattgtaaaggcatagagttgaggtgaatagttttgttagaaccttataaaaataaaatgcaagaaaataatatgaagaaatcacatatatatgtttgaattagatgtctgtttgaattagatccttggggaatttcttcaaactagttctggttcttatatttgttttttttcctttaaggaactttctgaaggaagttagactgcgatggtaaagggggaaatgggttaatgagattgcaggcattttctatattctttttggcataagcacttatgtccctgatatgtacaaattcaaaggaggtggttaataactttagtaaataatatattgtcgcatttaatgatgtggagggctaaggtcattacggactttaaataaactattatatggctggttcctcaagcactgctgcgtatttaataatgagcttctaaaagcatttcttaagttgcagacctataagattacaaatgtcactcatgttagtataatccacatgcaagtgatgaagccttctctttgatgtgctaaattggagaaggactaatggagctatgaatatacaatagaacatatttaagtagtagtcttgctttaggtaaaacactttcttgaaaccagaggcatttcaaacaataaaacccggctctaatggggatgctctgtgtggatagaaagctactaaaaacactcaggtttattctgatgtgagcagcgattgtgtgcagttcctcccccaatctcaacattgcttaggaaaaaaaaaaatctatgagtttattccacctttcatccattgcatttgtgatgttattagttagcaagatggacactgttctttagaaaggacttatttaatattaaccacgtcatagagcaagatggcccccagtccctacaagcaagtgcaattaaaaataaaagcaaatgttactgagccctgctgaactcctgataaaaaaaattatgtttatggtacatataaatgtctcaatcatgcaaattgtcactcttgttaatgaaacaattttgtaaaaagatagtcctctaaaagggtttaatgttttttacctatctaactgtctaattagatttacacatcccgcaaggcaggggagcctgaaggcttttccaaaccaaatcgtttgccactagaaactattttcagctcttcatgatttattaggaaatagtttaacccggactgtagtgtcttataaaatacaaaacgagaaaactgacacaccaaaatgaagtctgtgaaattgtcatcctcttaatattacctgtatttaaattctttcttttgcccttattaacactgatatttgaaacaactaatcatctaaaaggaagctcttaaagggctttaaatgtcaatatagtaagattctaatgtgcactactatttatataaaatatttcttagggcccataaatcatataataaacagtgaacccaagagctacatatggagtctagtgaagagttcccatgtagcctaactaattgtatttaaattgaggagatccaaaaaccccatcacccttcaccccaaagaccccttcacccttcaccagggaattctatcctgggtgctgtcccacctatgaccccttcaagaggccattggaaaaaggccatttacaagttaatgttacttatagctttgttactaagactcacctattgttagtgcagccaagtcacagaagtgcttattgcagttaaatagcaatttgtttccatgaaactgcaattaaagtattactgagcagccattttagattggcagtgctctgaacgcatgttaaacagccagctactcccacttgcagagtctgagatctgactagcagcaaagtgtagcacattcgccgatgctgggtacctagttaaagaggcatttgtagccctctgctcccatcgtgaacatgctgagagcaatgacaagtcagggctgatttttggaaggtgaacttgcaacttacctcaagtgaatactgttttcagttgtgcaagaagtgctttatgctagtagatatgtgcatgtttcctagagggaatgttttcaagttcagattgattctgctgagaatggacggcaactcggaggcctcaagccaataatgtactacaggccctgacatgttacagctgtgtaaacagggccattctatttcctaaatcacaactaataaancagaggatgaaaa

SEQ ID NO: 94 - DNA, 3366 bp, Homo sapiens
  misc_feature: Incyte ID No: 474496.2
  unsure 2912-3147, 3200, 3216, 3237, 3363: a, t, c, g, or other
ctcggaggcagcgagacagcccaccaggcggctgctcggcgttctctcaggtgactgctcggagttctcccagtgttaggtgttgcaagcaggatccaaaggagacctatagtgactcccaggagctcttagtgaccaagtgaaggtacctgtggggctcattgtgcccattgctctttcactgctttcaactggtagttgtgggttgaagcactggacaatgccacatactttgtggatggtgtgggtcttgggggtcatcatcagcctctccaaggaagaatcctccaatcaggcttctctgtcttgtgaccgcaatggtatctgcaagggcagctcaggatctttaaactccattccctcagggctcacagaagctgtaaaaagccttgacctgtccaacaacaggatcacctacattagcaacagtgacctacagaggtgtgtgaacctccaggctctggtgctgacatccaatggaattaacacaatagaggaagattctttttcttccctgggcagtcttgaacatttagacttatcctataattacttatctaatttatcgtcttcctggttcaagcccctttcttctttaacattcttaaacttactgggaaatccttacaaaaccctaggggaaacatctcttttttctcatctcacaaaattgcaaatcctgagagtgggaaatatggacaccttcactaagattcaaagaaaagattttgctggacttaccttccttgaggaacttgagattgatgcttcagatctacagagctatgagccaaaaagtttgaagtcaattcagaatgtaagtcatctgatccttcatatgaagcagcatattttactgctggagatttttgtagatgttacaagttccgtggaatgtttggaactgcgagatactgatttggacactttccatttttcagaactatccactggtgaaacaaattcattgattaaaaagtttacatttagaaatgtgaaaatcaccgatgaaagtttgtttcaggttatgaaacttttgaatcagatttctggattgttagaattagagtttgatgactgtacccttaatggagttggtaattttagagcatctgataatgacagagttatagatccaggtaaagtggaaacgttaacaatccggaggctgcatattccaaggttttacttattttatgatctgagcactttatattcacttacagaaagagttaaaagaatcacagtagaaaacagtaaagtttttctggttccttgtttactttcacaacatttaaaatcattagaatacttggatctcagtgaaaatttgatggttgaagaatacttgaaaaattcagcctgtgaggatgcctggccctctctacaaactttaattttaaggcaaaatcatttggcatcattggaaaaaaccggagagactttgctcactctgaaaaacttgactaacattgatatcagtaagaatagttttcattctatgcctgaaacttgtcagtggccagaaaagatgaaatatttgaacttatccagcacacgaatacacagtgtaacaggctgcattcccaagacactggaaattttagatgttagcaacaacaatctcaatttattttctttgaatttgccgcaactcaaagaactttatatttccagaaataagttgatgactctaccagatgcctccctcttacccatgttactagtattgaaaatcagtaggaatgcaataactacgttttctaaggagcaacttgactcatttcacacactgaagactttggaagctggtggcaataacttcatttgctcctgtgaattcctctccttcactcaggagcagcaagcactggccaaagtcttgattgattggccagcaaattacctgtgtgactctccatcccatgtgcgtggccagcaggttcaggatgtccgcctctcggtgtcggaatgtcacaggacagcactggtgtctggcatgtgctgtgctctgttcctgctgatcctgctcacgggggtcctgtgccaccgtttccatggcctgtggtatatgaaaatgatgtgggcctggctccaggccaaaaggaagcccaggaaagctcccagcaggaacatctgctatgatgcatttgtttcttacagtgagcgggatgcctactgggtggagaaccttatggtccaggagctggagaacttcaatccccccttcaagttgtgtcttcataagcgggacttcattcctggcaagtggatcattgacaatatcattgactccattgaaaagagccacaaaactgtctttgtgctttctgaaaactttgtgaagagtgagtggtgcaagtatgaactggacttctcccatttccgtctttttgatgagaacaatgatgctgccattctcattcttctggagcccattgagaaaaaagccattccccagcgcttctgcaagctgcggaagataatgaacaccaagacctacctggagtggcccatggacgaggctcagcgggaaggattttgggtaaatctgagagctgcgataaagtcctaggttcccatatttaagaccagtctttgtctagttgggatctttatgtcactagttatagttaagttcattcagacataattatataaaaactacgtggatgtaccgtcatttgaggacttgcttactaaaactacaaaacttcaaattttgtctggggtgctgttttataaacatatgccagatttaaaaattggtttttggtttttcttttttctatgagataaccatgatcataagtctattactgatatctgaatatagtcccttggtatccaagggaattggttgcaggatcctcgtggatatcaaaattcatagatgatcaagtcccttatannnnnnnnnnnnnnnnnnnnnnnnnnnnnnnnnnnnnnnnnnnnnnnnnnnnnnnnnnnnnnnnnnnnnnnnnnnnnnnnnnnnnnnnnnnnnnnnnnnnnnnnnnnnnnnnnnnnnnnnnnnnnnnnnnnnnnnnnnnnnnnnnnnnnnnnnnnnnnnnnnnnnnnnnnnnnnnnnnnnnnnnnnnnnnnnnnnnnnnnnnnnnnnnnnnnnnnnnnnnnnnnnnnnnnnnnnnnctgtagcaactggcttagttcattaggaaacagcacaaatgaacttaagattntcaatgactgtgtcantctttcttcctgctaagagantcctctgtggccacaaaaggcattctctgtcctacctagctgtcacttctctgtgcagctgatctcaagagcaacaaggcaaagtatttggggcactccccaaaacttgttgctattcctagaaanaag

SEQ ID NO: 95 - DNA, 2642 bp, Homo sapiens
  misc_feature: Incyte ID No: 257114.7
gcggcggcggttgaactgactcggagcgaggagacccgagcgagcagacgcggcccctggcgcccgccctgcgcactcaccatggcgatgcatttcatcttctcagatacagcggtgcttctgtttgatttctggagtgtccacagtcctgctggcatggccctttcggtgttggtgctcctgcttctggctgtactgtatgaaggcatcaaggttggcaaagccaagctgctcaaccaggtactggtgaacctgccaacctccatcagccagcagaccatcgcagagacagacggggactctgcaggctcagattcattccctgttggcagaacccaccacaggtggtatttgtgtcactttggccagtctctaatccatgtcatccaggtggtcatcggctacttcatcatgctggccgtaatgtcctacaacacctggattttccttggtgtggtcttgggctctgctgtgggctactacctagcttacccacttctcagcacagcttagctggtgaggaacgtgcaggcactgaggctggagggacatggagccccctcttccagacactatacttccaactgccctttcttctgatggctattcctccaccttattcccagcccctggaaactttgagctgaagccagcacttgctccctggagttcggaagccattgcagcaaccttccttctcagccagcctacatagggcccaggcatggtcttgtgtcttaagacagctgctgtgaccaaagggagaatggagataacaggggtggcagggttactgagcccatgacaatgcttctctgtgactcaaaccaggaatttccaaagatttcaagccagggagaagggttcttggtgatgcagggcatggaacctggacaccctcagctctcctgctttgtgccttatctacaggagcatcgcccattggacttcctgacctcttctgtctttgagggacagagaccaagctagatcctttttctcacctttctgcctttggaacacatgaagatcatctcgtctatggatcatgttgacaaactaagttttttttatttttcccattgaactcctagttggcaattttgcacattcatacaaaaaaatttttaatgaaatgatttcattgattcatgatggatggcagaaactgctgagacctatttccctttcttggggagagaataagtgacagctgattaaaggcagagacacaggactgctttcaggctcctggtttattctctgattgatagactgagctccttccaccagaaggcactgcctgcaggaagaagatgatctgatggccgtgggtgtctgggaagctcttcgtggcctcaatgccctcctttatcctcatctttcttctatgcagaacaaaaagctgcatctaataatgttcaatacttaatattctctatttattacttactgcttactcgtaatgatctagtggggaaacatgattcattcacttaaaatactgattaagccatgggcaggtactgactgaagatgcaatccaaccaaagccattacattttttgagttagatgggactctctggatagttgaacctcttcactttataaaaaaggaaagagagaaaatcactgctgtatactaaatacctcacagattagatgaaaagatggttgtaagctttgggaattaaaaacaaacaaatacattttagtaaatatatatttttaaatagtctatgactgttctgttctcctaattccaacagaaagcacatgaacccttgtaacaactgcaggggctgagtggggctaatagaactggtagtactctttataagcctgtctgaggacagagtccatccatctgctacaaagacaactctgctcagggaaacccagccctgaaatgctgcacccaggtagacaccccagaatgccaactgaggcaagtcaagtcattcttcattcatgtaacaagtattaattgagtacatgctataagaaaagtaactgtcacacggactttaagcacctgtgttggcacaattactcagcatcttctctccctgcgggcagaagcaaatataatagccactagttaatttacaataagaaataactgccctagaaagtagactatgtcacacctttaggactgatcagggcattcccccatgtttgcagggaactggaaagctgcctggtgtctcaagaagcctgtttctaaaagcatcaccgccccttcccccaaccagtgacagtccaggctgtgctggccaagagcccaggctctggaatcagatggccaggatttgaattcttgtgctgaggcttcctagatatgtaactttgggcaaattactttacctctctaagtctcagttttctcctctataaaatggtgataacactgtcttctgcagtggttgctggagataagccagtctgtgaaagtgccaaacagcaccgccttttgttaagcaacaaagaaataattagttctcactgcctcccaggtccgcacacgggagacatatccaaagcctgcaaggatgatgccaggccagatgaagtggaattttgggtcctatcttttaaaacatttaaaatcaagaaacattttttattaaaattaat

SEQ ID NO: 96 - DNA, 845 bp, Homo sapiens
  misc_feature: Incyte ID No: 984005.1
  unsure 805: a, t, c, g, or other
ggagaaatcacataaccttaaaaaggactatattaatcaccttctttgtaatcccttcacagtcccaggtttagtgaaaaactgctgtaaacacaggggacacagcttaacaatgcaacttttaattactgttttcttttttcttaacctactaatagtttgttgatctgataagcaagagtgggcgggtgagaaaaaccgaattgggtttagtcaatcactgcactgcatgcaaacaagaaacgtgtcacacttgtgacgtcgggcattcatataggaagaacgcggtgtgtaacactgtgtacacctcaaataccaccccaacccactccctgtagtgaatcctctgtttagaacaccaaagataaggactagatactactttctctttttcgtataatcttgtagacacttacttgatgatttttaactttttatttctaaatgagacgaaatgctgatgtatcctttcattcagctaacaaactagaaaaggttatgttcatttttcaaaaagggaagtaagcaaacaaatattgccaactcttctatttatggatatcacacatatcagcaggagtaataaatttactcacagcacttgttttcaggacaacacttcattttcaggaaatctacttcctacagagccaaaatgccatttagcaataaataacacttgtcagcctcagagcatttaaggaaactagacaagtaaaattatcctctttgtaatttaatgaaaaggtacaacagaataatgcatgatgaactcacctaattatgaggtgggaggagcgaaatntaaatttcttttgctatagttatacatcaatttaaaaagc

SEQ ID NO: 97 - DNA, 1696 bp, Homo sapiens
  misc_feature: Incyte ID No: 977667.1
gagccccagagagaaagacggtcatttcctccctgcatcttcccttggggctttaaaaaccacagcccttgggcaggagggaccttcgatcctcggggagcccaggagaccagaacatggactccttcaattataccacccctgattatgggcactatgatgacaaggataccctggacctcaacacccctgtggataaaacttctaacacgctgcgtgttccagacatcctggccttggtcatctttgcagtcgtcttcctggtgggagtgctgggcaatgccctggtggtctgggtgacggcattcgaggccaagcggaccatcaatgccatctggttcctcaacttggcggtagccgacttcctctcctgcctggcgctgcccatcttgttcacgtccattgtacagcatcaccactggccctttggcggggccgcctgcagcatcctgccctccctcatcctgctcaacatgtacgccagcatcctgctcctggccaccatcagcgccgaccgctttctgctggtgtttaaacccatctggtgccagaacttccgaggggccggcttggcctggatcgcctgtgccgtggcttggggtttagccctgctgctgaccataccctccttcctgtaccgggtggtccgggaggagtactttccaccaaaggtgttgtgtggcgtggactacagccacgacaaacggcgggagcgagccgtggccatcgtccggctggtcctgggcttcctgtggcctctactcacgctcacgatttgttacactttcatcctgctccggacgtggagccgcagggccacgcggtccaccaagacactcaaggtggtggtggcaatggtggccagtttctttatcttctggttgccctaccaggtgacggggataatgatgtccttcctggagccatcgtcacccaccttcctgctgctgaataagctggactccctgtgtgtctcctttgcctacatcaactgctgcatcaaccccatcatctacgtggtggccggccagggcttccagggccgactgcggaaatccctccccagcctcctccggaacgtgttgactgaagagtccgtggttagggagagcaagtcattcacgcgctccacagtggacactatggcccagaagacccaggcagtgtaggcgacagcctcatgggccactgtggcccgatgtccccttccttcccggccattctccctcttgttttcacttcacttttcgtgggatggtgttaccttagctaactaactctcctccatgttgcctgtctttcccagacttgtccctccttttccagcgggactcttctcatccttcctcatttgcaaggtgaacacttccttctagggagcaccctcccaccccccacccccccacacacaccatctttccatcccaggcttttgaaaaacaaacagaaacccgtgtatctgggatatttccatatggcaataggtgtgaacagggaactcagaatacagacaagtagaaagattctcgcttaaaaaaatgtatttattttatggcaagttggaaaatatgtaactggaatctcaaaagttctttgggacaaaacagaagtccatggagttatctaagctcttgtaagtgagttaatttaaaaaagaaaattaggctgagagcagtggctcacgcctgtaacccag

SEQ ID NO: 98 - DNA, 1727 bp, Homo sapiens
  misc_feature: Incyte ID No: 996862.4
cagcgccgaggtgcgccgagcaggagcagggaacaaaggagcggagaggggaggggagagagttgggcgagggagagcccccggccggctgccagaagatcccggcgggaggaagcccaagtgtcacttgaattccacccaaggagcgggcgcctgggatcagagcgtcctgtttagcaataacggctggagcacgtcctacaagttacgggagagtcggctgtgaaggagacgttcgcttatcccctgtgtccccgctcctggcccctccagacccccgccttgcctcgcgctgggaggggagatccagaatgaaaggcaagaaaggtattgttgcagcatctggcagtgagactgaggatgaggacagcatggacattcccttggacctttcttcatccgctggctcaggcaagagaaggagaaggggcaacctacccaaggagtctgtgcagattcttcgggattggctgtatgagcaccgttacaatgcctatccttcagagcaagaaaaagcgttgctgtcccagcaaacacacctgtctacgctacaggtctgtaactggttcatcaacgcccgccgcaggctcctccctgacatgctgagaaaggatggcaaagatccaaatcagttcacaatttcccgccgtggggccaagatttctgaaacgagctctgtggagtccgtgatgggcatcaaaaacttcatgccagctctagaggagaccccatttcattcctgtacagctgggccaaacccaaccctagggaggccactgtctcctaagccgtcatccccgggatcagttttggctcgtccatcagtgatctgccataccactgtgactgcattgaaagatgtccctttctctctctgccagtcggtcggtgtgggacaaaacacagatatacagcagatagcggccaaaaacttcacagacacctctctcatgtacccagaggacacttgtaaatctggaccaagtacgaatacacagagtggtcttttcaacactcctccccctactccaccggacctcaaccaggacttcagtggatttcagcttctagtggatgttgcactcaaacgggctgcagagatggagcttcaggcaaaacttacagcttaacccattttcaagcaaaacagttctcagaaatgtcatgattgccggggtgaaggcaagagatgaattgcattattttatatattttttattaatatttgcacatgggattgctaaaacagcttcctgttactgagatgtcttcaatggaatacagtcattccaagaactataaacttaaagctactgtagaaacaaagggttttcttttttaaatgtttcttggtagattattcataatgtgagatggttcccaatatcatgtgatttttttttcctccccttccctttttttgttattttttcagactgtgcaatacttagagaacctatagcatcttctcattcccatgtggaacaggatgcccacatactgtctaattaataaattttccattttttttcaaacaagtatgaatctagttggttgatgccttttttttcatgacataataaagtattttctttaaaaattgttgtaattcagagtatttctgttgagggaggtgcttcttaaaaataagtaggaatatagcaccccagtgagcaggaagctgggggggtagggtgcagtgttagggggtgtcaccagctctttga

SEQ ID NO: 99 - DNA, 5347 bp, Homo sapiens
  misc_feature: Incyte ID No: 364940.19
taaattgggtctattacctaggctgcaaatgtctaatgttggctaatcctttgtgcattttccatatagataagtcctagcttaagtaaccaaaaactagttttaaaaaaaacaaggcatgtatcatgtctccatcccccaagaccacgctcctttcagcctgaggcaagtcaaaaagccccgtcaaaacaaccaaagatacctacttttggaattcccactctctgttgtccaatggacacacctgtcgtgttttgagccagcgagagatgcagtggaagtgaaaagcatggttacagactccccatgcgacagtacactcttctgaagtagcggacgcctggttagcttgacattctatgcaaagatccataatgtggttcctgcagatggcacagttatcaaccacaatatcccaggcccagagggctactgcattccactttttcacttcaaagcgcttcttgccccgcgccgctgttggtgccgctcggggtatccacatccatcgctgcgggctcacaaagcggccagacgctcggcggcggcgtgtggcaggagcgcaggggcgcgagccggcgatcagccttcccggcgaccgtgccgcgggagctcgagcaactcggactaggggacccgggccggcccccaagatgccggcgatcgcggtgttggcggcggccgccgcggcgtggtgcttcctccaagtcgagagccggcacctggacgcgctcgccggaggcgcgggccccaaccacggcaatttcctagacaatgaccagtggctgagcaccgtctcccagtacgaccgggacaagtactggaaccgctttcgagacgatgattatttcagaaactggaatcccaacaagccctttgaccaagccctggacccatccaaggacccctgcctgaaggtaaaatgcagccctcacaaagtgtgtgtgacccaggactaccagaccgccctgtgtgtcagccgcaagcacctgctccccaggcaaaagaaggggaacgtggcccagaaacactgggttggaccttcgaatttggtcaagtgcaagccctgtcccgtggcacagtcagccatggtctgcggctcagatggccactcctacacatccaagtgcaaattggagttccatgcttgttctactggcaaaagcctcgccaccctctgtgatgggccctgtccctgtctcccagagcctgagccaccaaagcacaaggcagaaaggagtgcctgcacagacaaggagttgcggaaccttgcctcccggctgaaggattggtttggagctctccacgaggatgcgaacagagtcatcaagcccaccagctccaacacagcccaaggcaggtttgacactagcatcctgcccatctgcaaggactccctgggctggatgttcaacaagttggacatgaactatgacctcctgcttgacccttcagagatcaatgccatctacctggataagtacgagccctgtatcaagcctcttttcaactcgtgtgactccttcaaggatggcaagctttctaacaatgagtggtgctactgcttccagaagcctggaggtctcccttgccagaatgaaatgaacagaattcagaagctgagtaaggggaaaagcctgttgggggccttcatacctcggtgtaatgaggagggctattacaaagccacacagtgccacggcagcacggggcagtgctggtgtgtggacaaatatgggaatgagttggctggctccaggaaacagggtgctgtgagctgtgaagaggagcaggaaacctcaggggattttggcagtggtgggtccgtggtcctgctggatgacctagaatatgaacgggagctgggaccaaaggacaaagaggggaagctgagggtgcacacccgagccgtgacagaggatgatgaggatgaggatgatgacaaagaggatgaggtcgggtacatatggtagtgcccacaagaaagaggacacaagttttgcacaaaattgcaagtcacttcctattcctgcatttgtatctaagactccaaggcaccaaggtctcttctccattgttgctctctatacccgacctaaggtttggaagacaactgcttgttcccagaggattctgattttgcatatgtttgtatgggagaaagggtgttgtgtttttttttttgttgttgtttattttttggatagggaagtcattggcttaattagagcctccttcctttctgtgagatttttccaacaagcatgtgatttacgtggaattctgacagtgcagggagcccccaccctcttaaatgtcaaagaccctttttgattacccacactggtggttattacagcatggttcccagccttacagtgtctaagtgcttctcttgtgtcctgtagatgttgtgaaaaagaaaaaaacaaaaaatacaccacactgtactttttccccctgcccccgttactgccggtgattattattaaaaattagtttttttcacatcattatatctggcttcctataaacaacagccttaattcagtcaagactccctttggggaattcattttattaaaaattggtgtctggatacttccctgtacatgcataaatatgcatgcatgtacagaaagactgtatgtgtgtgccttgcacacacacccatacctctcagaaaaagtgtttgggtatcttaaaaactcgaaaaacaatgataaatttctcagcttgtccagacctggaacaaaatttctggaataagaaatttgtattaaagtccttttttgcactaacagttggctcttgtagcctgcaggctgaggaagtctcttctctgtgcatcagcagagttactgaaagcctctgattgagaaaaaacctccgtctgcctaaatcacttttctcgcagaagccatgcgactcccacacgacacgggcagcttcacaagccatctctttcatttctgcttgaagcccccttggctgcagcaatcctgtctgccataggtttcttccttccttacctactcaagggctttttctaaggcatgcacacatatctcctgttctctgagagtaccatggtgttccttaaaagaagaaaatttctaattctgaactcaatgttttgcttttactccctttctactgacaaatcatgataagggcacaaaagctgtacagattttttttttttaaccactcaatcccaaatggaggcctacaaagaacatcgtaataacacatggaagcaaaccctgggtttttaagagcaaattctgtcccccctcactcccccaagtgacaagatactaatgaagaaagttcttcaccatagtgtttgttttaactaaactcattggagtctagttccaaatttggtagggtcatcatctctacattccttaggatttctctccctatcaagctggcccagatacaagtaccaaacagtagtctctgaagttcccccatttccttcagtaccagtctataagctactgtccgccactgattttcatttatcagggtgtcctaatcagaatcagccacccaagcaagcctctctggcccacatatctatctcttgccttcccccatgaacttcagcctgtccacacaaaagccacataaactcaagcaagaaatatgttcagccaaaacatgattatagtggcagctgaccaatcccccatcccaaattgaccatttagatgtaccaactcaccttaaattagcatgttccaatccagtcggcattgcctgaatacagtagcatcatacctatagttggtcttagataagaaatgaactacttgatatagcaaagtcctttggcttcgtaaataaccctgaggttttgtacttactttccccataggaagacagaccataggcaaactctgttttgggatctcaactccatcacctttgtttcaatattttttttctctcttgaacaaaactgagataatttagaaaacaggtgcttaattgcaataaaattactatgaagtatattaaaaatcacgacattgtaaaatctcactttagatcatcaaagaaaaccattgttactatctcctttgagcttaggaaaatgtacaagagaacaaattaaaattgaaaaattgatttcacttagaaaaacttctaggaacagggtgaaccactgattttaatttgcctaattatcttatgacaagtatcaaattaagatgacacttaaagatccttagcattaacttaatgatggagaagagtgctcaatagacagttcccagtaaggtaatgagatgccattttcagagacattctaagaagatattttgattcattaaaacattaaataaaaagccctcctcagattggaacccccaaatcgatggagccacattaataatacttttcatgcctcactttgacatgacagcattcgatttttttaaagatctttaatactttccatgagtactaaagattgtaatgagttaccttatccttagaagtagaatgtttgctttcttcttcttggaaatggtcctccaaaaagtccacttgtaccagtgacaagaagtcacttgtatagtgaccaagtacacataaaatactgattataaaaatattgtaataaaccacttcctcatttgatacaggtattaagctgaatcctcactaattcacttttgaaaagttcttaatgaacagttttattcttattccatgaacagctcttttaatacaatttccttggtatccaacttaaatcccagaattttgttccaccatggttagttatttgccatatgaatgtattcttgtttctaccaatattctaggcatgagaataccttaatactgagttggagattttgtatctgtttctcctcctttacgcccattttcctacccacagcagcaaatgacaacgtgtctgtccaggtctgtccccctgctcatcccaggatgccactcacatttttttcttcttgttaccttgaccacgctgtacagtaacatccaagagcccattctacagtgggtggttttggtctttttataactttttctcaaagtcactgatgtttgttcctgttaaatgtatagcattgtaatgagagcccatcaaatcctgagtgtcagtttgttgtccctattgtagatgaaatagtgatgtagcaaaaacctagtaaattctgaatgcttttccacgtagacttatctggaatgtgaacacaactctttggttaatagtaaatgcttaactgtagtcctgagtaggtgcatttctgtctgtctcaataaattttactttgtctgcaaaaaaaaaaaaaaaggg

SEQ ID NO: 100 - DNA, 2463 bp, Homo sapiens
  misc_feature: Incyte ID No: 1041140.4
gtgctatgtccctagagctcataggatgctcctcacatctgtaatctcatccacaaggtctcactgtcccattctatgtgatatgtggatccctatccatgagccggggcaagcatcctgggatggctgagggcacactctggcagattctgtgtgtgtcctcagatgctcagccacagacctttgagggagtaaagggggcagacccacccaccttgcctccaggctctttccttcctggtcctgttctatggtggggctcccttgccagacttcagactgagaagtcagatgaagtttcaagaaaaggaaattggtgggtgacagagatgggtggaggggctggggaaaggctgtttacttcctcctgtctagtcggtttggtccctttagggctccggatatctttggtgacttgtccactccagtgtgggcatcatgtggcagctgctcctcccaactgctctgctacttctagtttcagctgggcatgcggactgaagatctcccaaaggctgtggtgttcctggagcctcaatggtacagcgtgcttgagaaggacagtgtgactctgaagtgccagggagcctactcccctgaggacaattccacacagtggtttcacaatgagagcctcatctcaagccaggcctcgagctacttcattgacgctgccacagtcaacgacagtggagagtacaggtgccagacaaacctctccaccctcagtgacccggtgcagctagaagtccatatcggctggctgttgctccaggcccctcggtgggtgttcaaggaggaagaccctattcacctgaggtgtcacagctggaagaacactgctctgcataaggtcacatatttacagaatggcaaagacaggaagtattttcatcataattctgacttccacattccaaaagccacactcaaagatagcggctcctacttctgcagggggcttgttgggagtaaaaatgtgtcttcagagactgtgaacatcaccatcactcaaggtttggcagtgtcaaccatctcatcattctctccacctgggtaccaagtctctttctgcttggtgatggtactcctttttgcagtggacacaggactatatttctctgtgaagacaaacatttgaagctcaacaagagactggaaggaccataaacttaaatggagaaaggaccctcaagacaaatgacccccatcccatgggagtaataagagcagtggcagcagcatctctgaacatttctctggatttgcaaccccatcatcctcaggcctctctacaagcagcaggaaacatagaactcagagccagatcctttatccaactctcaatttttccttggtctccagtggaagggaaaagcccatgatcttcaagcagggaagccccagtgagtagctgcattcctagaaattgaagtttcagagctacacaaacactttttctgtcccaaccattccctcacagtaaaacaacaatacaggctagggatggtaatcctttaaacatacaaaaattgctcgtattataaattacccagtttagaggggaaaaaaagaaaataattattcctaaacaaatggataagtagaattaatggttgaggcaggaccctacagagtgtgggaactgctggggatctagagaattcagtgggaccaatgaaagcatggctgagaaatagcagggtagtccaggatagtctaagggaggtgttcccatctgagcccagagataagggtgtcttcctagaacattagccgtagtggaattaacaggaaatcatgagggtgacgtagaattgagtcttccaggggactctatcagaactggaccatttccaagtatataacgatgagccctctaatgctaggagtagcaaatggtcctaggaaggggactgaggattggggtgggggtggggtggaaaagaaagtacagaacaaaccctgtgtcactgtcccaagttaagctaagtgaacagaactatctcagcatcagaatgagaatgagaaagcctgagaagaaagaaccaaccacaagcacacaggaaggaaagcgcaggaggtgaaaatgctttcttggccagggtagtaagaattagaggttaatgcagggactgtaaaaccaccttttctgcttcaatgtctagttcctgtatagctttgttcattgcatttattaaacaaatgttgtataaccaatactaaatgtactactgagcttcactgagttacgctgtgaaactttcaaatccttcttcatgtcagttccaatgaggtggggatggagaagacaattgttgcttatgaaagaaagctttagctgtctctgttttgtaagctttcagtgcaacatttcttggttccaataaagcattttacaagatcttgcatgctactcttagatagaagatggcaaaaccatggtaataaaatatgaatgat

SEQ ID NO: 101 - DNA, 1832 bp, Homo sapiens
  misc_feature: Incyte ID No: 408246.2
ctcatccagttcctttgcggtcctcttcttcagcacatgccaaagctgttcctcacggcctgtgagacaagagcatcttggatgtaggacaatggaagagttagatgccttattggaggaactggaacgctccacccttcaggacagtgatgaatattccaacccagctcctcttcccctggatcagcattccagaaaggagactaaccttgatgagacttcggagatcctttctattcaggataacacaagtcccttgccggcgcagctcgtgtatactaccaatatccaggagctcaatgtctacagtgaagcccaagagccaaaggaatcaccaccaccttctaaaacgtcagcagctgctcagttggatgagctcatggctcacctgactgagatgcaggccaaggttgcagtgagagcagatgctggcaagaagcacttaccagacaagcaggatcacaaggcctccctggactcaatgcttgggggtctcgagcaggaattgcaggaccttggcattgccacagtgcccaagggccattgtgcatcctgccagaaaccgattgctgggaaggtgatccatgctctagggcaatcatggcatcctgagcattttgtctgtactcattgcaaagaagagattggctccagtcccttctttgagcggagtggcttggcctactgccccaacgactaccaccaacttttttctccacgctgtgcttactgcgctgctcccatcctgggataaagtgctgacagcaatgaaccagacctggcacccagagcacttcttctgctctcactgcggagaggtgtttggtgcagaaggctttcatgagaaggacaagaagccatattgccgaaaggatttcttagccatgttctcacccaagtgtggtggctgcaatcgcccagtgttggaaaactacctttcagccatggacactgtctggcacccagagtgctttgtttgtggggactgcttcaccagtttttctactggctccttctttgaactggatggacgtccattctgtgagctccattaccatcaccgccggggaacgctctgccatgggtgtgggcagcccatcactggccgttgtatcagtgccatggggtacaagttccatcctgagcactttgtgtgtgctttctgcctgacacagttgtcgaagggcattttcagggagcagaatgacaagacctattgtcaaccttgcttcaataagctcttcccactgtaatgccaactgatccatagcctcttcagattccttatagaatttaaaccaagagaggagaggaaagggtaaattttctgttactgaccttctgcttaatagtcttatagaaaaaggaaaggtgatgagcaaataaaggaacttctagactttacatgactaggctgataatcttattttttaggcttctatacagttaattttataaattctctttctccctctcttctccaatcaagcacttggagttagatctaggtccttctatctcgtccctctacagatgtattttccacttgcataattcatgccaacactggttttcttaggtttctccattttcacctctagtgatggccctactcatatcttctctaatttggtcctgatacttgtttcttttcacgttttcccatttgccctgtggctcactgtcttacaatcactgctgtggaatcatgataccacttttagctctttgcatcttccttcagtgtatttttgtttttcaagaggaagtagattttaactggacaactttgagtactgacatcattgataaataaactggcttgtggtttc

SEQ ID NO: 102 - DNA, 3155 bp, Homo sapiens
  misc_feature: Incyte ID No: 902740.4
gaccgggcgcggtctgtaggagaccggagcggcgagacagcggtgacaggagcagcggccgggagcccttagggaggcagacagagcctgcagccaatgccccaggagccctcggttccaaccaactgatgcccctgtgcccactggcccacgccatgcagccccagtccgttctgcacagcggctacttccacccactacttcgggcctggcagacagccaccaccaccctcaatgcctccaacctcatctaccccatctttgtcacggatgttcctgatgacatacagcctatcaccagcctcccaggagtggccaggtatggtgtgaagcggctggaagagatgctgaggcccttggtggaagagggcctacgctgtgtcttgatctttggcgtccccagcagagttcccaaggacgagcggggttccgcagctgactccgaggagtccccagctattgaggcaatccatctgttgaggaagaccttccccaacctcctggtggcctgtgatgtctgcctgtgtccctacacctcccatggtcactgcgggctcctgagtgaaaacggagcattccgggctgaggagagccgccagcggctggctgaggtggcattggcgtatgccaaggcaggatgtcaggtggtagccccgtcggacatgatggatggacgcgtggaagccatcaaagaggccctgatggcacatggacttggcaacagggtatcggtgatgagctacagtgccaaatttgcttcctgtttctatggccctttccgggatgcagctaagtcaagcccagcttttggggaccgccgctgctaccagctgccccctggagcacgaggcctggctctccgagctgtggaccgggatgtacgggaaggagctgacatgctcatggtgaagccgggaatgccctacctggacatcgtgcgggaggtaaaggacaagcaccctgacctccctctcgccgtgtaccacgtctctggagagtttgccatgctgtggcatggagcccaggccggggcatttgatctcaaggctgccgtactggaggccatgactgccttccgcagagcaggtgctgacatcatcatcacctactacacaccgcagctgctgcagtggctgaaggaggaatgatggagacagtgccaggcccaagaactagaactttaaaacgttcccggggcctcagacaagtgaaaaccaaagtaaatgctgcttttagaactgtgccctcatgccctcttcctgctcacatgctagcggggcccagcagccctgggtggttttgccagcatgctaactcttgtaactcgcagctgcatcctatgagctctcccaagcttccccgcccctcccctgggtcagccgtgaggcccacctttgccaccctcagctctttcctctggtgtggcttcagcttgaaagcaacctggagtcgggggcacagcctttggggcctggctgggagagggtcttggagcattaggggaagaagagagcagtgggatcttggggcctgagaagccttggaacgcttctggcagcagagctgggtgtgggaatgaggcctagatcgatatccctgggttagagttgaaatttgccgcaattccactggaaggcatttcccacgaggccagaggttgccaggctgcctgaggtctcctattctactctgaaccataaacccagagaagaattactcattaaccagcataaatactgcctgaggatcaaaactcagaggcaaagagggagttcctgactgctagaggtgccaccaccacaaacactttttattcaggagatactttttgagaatctctgctctgttcctaggttcagtgctgggtcctgggaatacagcaggacagacctcagcttatctcttcatagaaattatacaaagagaattggggagacagctaagaagaaaacaaagaaataaagcagttacaaattgtgataagtgctttgaaggaaagaaggggtctgagacaacaacagggaaggggcctctcttgaaacagtagttgggaaggaggcagacatgcaccagtgatgtggtgacaggtgctctgaaggaggtcaccaggacctgacctctttgaaggatcagaaaatacttccctgaaggactgacatttgagcctagacctgaagggtgagccatcaagctaagacaattggggaagagcattccagggagagggaggagttgtgcaaaggccctggggctccttctagctggaggaatgcaaggctagcttgtctggagcactgagaggatggcctgaactgagtggagagagacagaccaggaccaaaccatgcagaggtcaagggccacattcaccttttcagagtgactcaatcaaatttgtagtttgtaaaagtattttaacagctctgcggcaaagtgcaaatgaaaagtcttgatggcatggactggagcggggacagtggggatggagaaaggggaatggattgtggatgtgtttagaaggtagattcgatgtgaaggatgaatctggcttgaccttctgggtggctgatgggccatttactgagatggggcagcctggaagaggaacagaagcagggtcggggtggagggagaatactaaacttagcttgagacattttgcaataaggaagctatatctagagtgcttatgtgactcacctaaggccactcaacaagtttgtggcagaactggattagaactgcacagaaaacagccaagctgggatttgaacccatgtagtccaactccaaggcctctgcccctaaccactgtgccataccacctcccaataatcaacagcaaaattataggtctaacaatgttttatagacacccctccatttatgtgatgggtttgcatcctgataaacccatcataagttgaaaatatgatcataagttgaaaatatgatcataagtcaaaaatgtatttaatatacctaacctaccaaacatcatagcttagcctagcctgccttaaacatgctcagaacacttacattagcctacagtgggcaaaactatccaacacaaaatctatattgtaataaagttataaagaattttaaccagaggccacgttttacttgtggcatcgaaaccacctttgcat

SEQ ID NO: 103 - DNA, 3045 bp, Homo sapiens
  misc_feature: Incyte ID No: 475486.9
  unsure 2143, 2186: a, t, c, g, or other
cggccttctgggcgcgcgcgacgtcagtttgagttctgtgttctccccgcccgtgtcccgcccgacccgcgcccgcgatgctggcgctgcgctgcggctcccgctggctcggcctgctctccgtcccgcgctccgtgccgctgcgcctccccgcggcccgcgcctgcagcaagggctccggcgacccgtcctcttcctcctcctccgggaacccgctcgtgtacctggacgtggacgccaacgggaagccgctcggccgcgtggtgctggagctgaaggcagatgtcgtcccaaagacagctgagaacttcagagccctgtgcactggtgagaagggcttcggctacaaaggctccaccttccacagggtgatcccttccttcatgtgccaggcgggcgacttcaccaaccacaatggcacaggcgggaagtccatctacggaagccgctttcctgacgagaactttacactgaagcacgtggggccaggtgtcctgtccatggctaatgctggtcctaacaccaacggctcccagttcttcatctgcaccataaagacagactggttggatggcaagcatgttgtgttcggtcacgtcaaagagggcatggacgtcgtgaagaaaatagaatctttcggctctaagagtgggaggacatccaagaagattgtcatcacagactgtggccagttgagctaatctgtggccagggtgctggcatggtggcagctgcaaatgtccatgcacccaggtggccgcgttgggctgtcagccaaggtgcctgaaacgatacgtgtgcccactccactgtcacagtgtgcctgaggaaggctgctagggatgttagacctcggccaggacccaccacattgcttcctaatacccacccttcctcacgacctcatttctgggcatctttgtggacatgatgtcacccaccccttgtcaagcattgcctgtgattgcccagcccagattcatctgtgccttggacatggtgatggtgatgggttgccatccaagtgaaagtcttttccttgaccaagggggacagtcagttttgcaaaaggactctaatacctgtttaatattgtcttcctaattgggataatttaattaacaagattgactagaagtgaaactgcaacactaacttccccatgctgtggtgtgacctgagttggtgacacaggccacagaccccagagcttggcttttgaaacacaactcagggcttttgtgaaggttcccccgctgagatctttcctcctggttactgtgaagcctgttggtttgctgctgtcgtttttgaggagggcccatgggggtaggagcagttgaacctgggaacaaacctcacttgagctgtgcctagacaatgtgaattcctgtgttgctaacagaagtggcctgtaagctcctgtgctccggagggaagcatttcctggtaggctttgatttttctgtgtgttaaagaaattcaatctactcatgatgtgttatgcataaaacatttctggaacatggatttgtgttcaccttaaatgtgaaaataaatcctattttctatggaagactggtacctggtttctggaagaggggtctgtgacttggagctgatctttactgagctcgccgtggcagatgccatgctcaggacgttcatgtggatggtttcatgtcatcgtgctggcaacttgtcctccctgccttagagatgaggctcagacaaacgaccttagcacccatagcctatgccatgagcactggctccaccctgaatcccagctcctccccttagtgaccccaagtctgtttccctcagctgcataaggaggcgatatagtttgaatatttgtccccagccaaatctcatgttgaaatgtaattcccacgtgttgaaggtggggcctgggtgggaagtgattagatcatggggacgggtatttcatggcttggtgctgttttcttgatggtgaatattgcaagatacggtcatttaaaattgtgtggcactcccccctgcccccttcttgctcctgctttcaccatgtgacatgtctgatcccccttcaccttttgccatggtcataagcttcctgaggcctccccagaagccaagtagatgcaagcattatgcntctgtaaagcctgcaggaccatggatccaattaaatctctttnctttatacattacctggtctcaagtatgtatagcaatgcaagaatggcctaatatcataggctatagaattttgcatatgtaatttcatctactatgtatattctgactcaaaaaccaagaatagaaaagcagttcaagtaaaaccacagctgcatttttgcctgcctctaggtatgtgagcttcaaagttggaagaaattaagcaacatgctttggaatctatggtgatctatagaaaggcaaagtttctggactcaccctgactgatggaaagacagactgcctgccaggacactaccctgctgtacccagtcttaagtataataaagatctcattttttactgtcaatgcaagccacattttcctattaggaaaatgtgaatgaaacaaagtgctcttcaagagcaaaccctgaattatactttgggttattctctgttcctcaaaaggattttgcatctaactgatagtctccaaattgtaatgacagtatatagatagcttggtgtagacatacaggtcaatacaaatggagaaaaggcaatttgccattgaagaatatgtttgctttaagtaaagatcaatatactaagaaagctatacatatctagacttccaaaaacagatgggaataaactactcagcaatcagaatattcgaagatggcactctgttcacttccagagaaaatagttcaaaactgtatctcaaagtggatataagctattgtactagaattagtccctgtgtgagcatttggcattataaaataagatgttcccaatgaaaagatcactggtatgtagataataaaatgtgaaaataaaaatttaaaaataaaacaaaaattatgtgat

SEQ ID NO: 104 - DNA, 1746 bp, Homo sapiens
  misc_feature: Incyte ID No: 233778.9
ctcaggcctgacggtccgagtggagctgcgggacagcccgaacctccaggtcagccccgcggccctccatggcgctggtgcgcgcacttcgtctgctgcctgctgactgcctggcactgccgctccggcctcgggctgcccgtggcgcccgcaggcggcaggaatcctcctccggcgataggacagttttggcatgtgactgacttacacttagaccctacttaccacatcacagatgaccacacaaaagtgtgtgcttcatctaaaggtgcaaatgcctccaaccctggcccttttggagatgttctgtgtgattctccatatcaacttattttgtcagcatttgattttattaaaaattctggacaagaagcatctttcatgatatggacaggggatagcccacctcatgttcctgtacctgaactctcaacagacactgttataaatgtgatcactaatatgacaaccaccatccagagtctctttccaaatctccaggttttccctgcgctgggtaatcatgactattggccacaggatcaactgcctgtagtcaccagtaaagtgtacaatgcagtagcaaacctctggaaaccatggctagatgaagaagctattagtactttaaggaaaggtggtttttattcacagaaagttacaactaatccaaaccttaggatcatcagtctaaacacaaacttgtactacggcccaaatataatgacactgaacaagactgacccagccaaccagtttgaatggctagaaagtacattgaacaactctcagcagaataaggagaaggtgtatatcatagcacatgttccagtggggtatctgccatcttcacagaacatcacagcaatgagagaatactataatgagaaattgatagatatttttcaaaaatacagtgatgtcattgcaggacaattttatggacacactcacagagacagcattatggttctttcagataaaaaaggaagtccagtaaattctttgtttgtggctcctgctgttacaccagtgaagagtgttttagaaaaacagaccaacaatcctggtatcagactgtttcagtatgatcctcgtgattataaattattggatatgttgcagtattacttgaatctgacagaggcgaatctaaagggagagtccatctggaagctggagtatatcctgacccagacctacgacattgaagatttgcagccggaaagtttatatggattagctaaacaatttacaatcctagacagtaagcagtttataaaatactacaattacttctttgtgagttatgacagcagtgtaacatgtgataagacatgtaaggcctttcagatttgtgcaattatgaatcttgataatatttcctatgcagattgcctcaaacagctttatataaagcacaattactagtatttcacagtttttgctaatagaaaatgctgattctgattctgagatcaatttgtgggaattttacataaatctttgttaattactgagtgggcaagtagacttcctgtctttgctttcttttttttttctttttgatgccttaatgtagatatctttatcattctgaattgtattatatatttaaagtgctcattaatagaatgatggatgtaaattggatgtaaatattcagtttatataattatatctaatttgtacccttgttgaaattgtcatttatacaataaagcgaattctttatctctaaatatg

SEQ ID NO: 105 - DNA, 4760 bp, Homo sapiens
  misc_feature: Incyte ID No: 350392.3
catttatggacagattgcccggcccgagccgagactcagccagaggagtacggattaagtggccgaagaaagaggagtgaggcaggggagcgaggcggacgctccgagcgcatcggactcacctgggccggcggcgagcggcgagtacgagtggactcttgccctccgcagcatgcgccccgcctgctaagtcgccgccgtctcgccctcacctagcaccgccaatcccgcctggatggagtcccctctgggttcccattggctcctgtgagtgcttgggtgtcgggagcctgtttttggcgaggggaaccaacttttgaagttcgcccagaagactgcgttccagccccagttccccggcagcgggacccggcgaagacgcgaccgcggcgcgagtcaccatgggaagcaaaggtgtctaccagtaccactggcaaagccacaatgtcaagcacagtggtgtggacgacatggtgctactgtccaagatcacagagaactccatcgtggagaatctgaagaagagatacatggatgactacatttttacatatataggatctgtattaatctcagtcaaccctttcaagcagatgccatattttggggaaaaggaaattgaaatgtaccaaggagcggcacagtatgaaaacccaccacatatctatgcccttgcagataatatgtacagaaacatgatcattgacagagagaaccagtgcgtcattatcagtggtgaaagtggtgctggaaaaacagtggctgccaaatatatcatgagctacatctccagagtgtctggaggagggaccaaagtccagcacgtgaaggacattatcctgcagtccaacccgctgctggaggccttcgggaacgccaagaccgtccggaacaacaactccagccgatttggaaaatactttgaaatccagttcagtccaggtggggaaccagatggtggaaagatctccaacttccttctggaaaaatctagggtggtgatgaggaacccaggagagcggagttttcacatattttaccagctcatcgagggcgcctctgcagagcagaaacacagccttggcatcaccagcatggactattattactacctgagcctctcgggctcatacaaggttgatgacattgacgacaggcgggagtttcaggaaactctgcacgccatgaatgtgattgggatctttgcagaagagcaaacgctggtgttgcagatagtggcgggtattctccacctgggaaacatcagcttcaaagaagttggcaactacgcggctgtggagagtgaagagtttttagcttttcctgcatatctgctagggataaaccaggaccggttgaaagaaaagctaacaagccggcagatggatagcaagtggggaggcaaatccgaatccatccacgtgaccctcaacgtagagcaggcctgttacacccgggatgcgctcgccaaggccctgcacgcccgggtctttgatttcttggtagattccatcaataaagccatggagaaagaccatgaagaatacaacattggcgtcctagacatctatggctttgaaatattccagaaaaatggctttgaacagttttgtatcaattttgttaatgaaaaactgcagcagatttttattgaactgacattaaaggcagaacaggaagaatatgttcaagagggaataagatggacacccattgagtactttaataataaaatcgtatgtgacctcatagagaacaaagtgaaccctcctggcatcatgagcatcctggatgacgtgtgcgccacgatgcatgcggtgggtgagggggcagatcagacgctgctccagaaacttcagatgcagattgggagtcatgagcacttcaacagttggaaccaaggcttcatcattcatcattatgctgggaaggtatcctatgacatggatggcttttgtgaaaggaaccgggatgtgctttttatggatctcatcgagcttatgcagagcagcgagctgcctttcataaagtctttatttccggaaaatctgcaggctgacaagaaagggcgcccaactactgccggaagcaaaataaagaaacaagccaatgaccttgtgagcaccctgatgaaatgtacgccccactacattcgctgcatcaagccaaacgaaaccaagaagcccagagactgggaggaaagcagggtaaagcatcaagtcgaatatttgggtctgaaagagaacattcgagtgagaagagctggctatgcctatcggcgcatcttccaaaaattcctacagaggtatgccattctgaccaaagccacctggccttcttggcagggagaggagaagcaaggcgtcctgcacctgctgcagtcggtcaacatggacagcgaccagttccagctggggaggagtaaagtgttcatcaaagcccccgagtctctatttcttttagaagagatgagagagagaaagtatgatgggtatgctcgagtgatacagaaatcatggaggaaattcgtggcccggaagaaatacgttcaaatgagagaagaagcctcagacctcttattgaacaagaaggagagaaggagaaacagtattaacaggaactttataggggattatattgggatggaagagcacccagaactccagcagttcgtgggcaagagggagaagattgatttcgcagacacagtcaccaagtatgacaggaggttcaagggtgtaaagcgagacctgctccttaccccaaagtgcttgtacttaatcggacgagaaaaagtcaaacagggcccagacaagggcctggtgaaagaagtcctgaagcggaaaatcgagatagaacggatcttgtctgtgtccctcagtactatgcaggatgacatttttattctccatgagcaagagtatgacagtttgcttgaatctgtcttcaaaactgaattcctaagcctcttagcaaagcgttacgaggagaagacccagaagcaactacctctgaaattcagcaatacgcttgaactgaagttgaaaaaggaaaactggggcccctggagtgcagggggctcccggcaagtgcagttccaccaagggtttggggacctggctgtcctcaagcccagtaacaaagtgctgcaggtcagcatcggacctggactgcccaagaactcccgtcctaccagaaggaacactacccaaaatacaggttattccagtgggactcaaaatgccaactacccagtgagagctgcccctcctcccccaggataccatcagaacggagtcatcagaaaccagtatgtgccatatccccatgctcctggaagccagaggtccaatcagaaaagcctgtacacctccatggcccgcccgcccttgcctcggcagcagtctaccagttcagaccgagtgtcacagacgccagagagcctggatttcctcaaggtcccggaccagggagctgcaggggtcaggagacaaacaaccagtcggcctcccccagcagggggcagacccaagccccagcccaagcccaagcctcaggtgccacagtgcaaggctttgtatgcctatgacgctcaggacacagacgaactcagctttaatgccaatgacattattgatattatcaaagaagatccttctggctggtggacgggtcgactacgaggcaagcagggcctgttccccaacaactatgtgaccaagatctgaggtgcccgtgactctgacacatggggcagaggagctccaggcacagaccaggggaggggatatttaggggctccccttacaatccacaatgagcaattgcttctccaaggcctggagctattctggtaccttccccatggaggacactgaaaaggctgggttggggacagggagtatcactccataagtgatcctaaaaggtagcctcttcataggaacccaggaggacaaaaccaccatgcattaagatttatttattgtatttaaacctggtgagaggacaagtgaggtctgctcagaccttgtaggcttctatcaaaacagcaccctgcttgctcaccaggcctagagaatggctgtaggtggccgctgacaagtgcctttagttgaagagcacatttctttcatctctcttgtccatacctgatagacacattcctctctgccaccttccttcagggaggacccgccctctgcagactgggcttagcgtgagcaggcacttcccatgtacgtgccaagggtaagctggcctgctgagcccagggcgacagaggggcactggtttacactttgccgggaccatcagggccgccaagcaggtcagggggctgggggctgggggctgggctgctggctttgctttctctgggtcttcaattagaatgtggctggcccatattggtttgtgtttaaatgctgtacttactacaagaaggatcttttttcaagctgtacatttataaaaacagatcatatactgtatatataaaaatcttgagatggtagaaacatgtatgaatgtactaagtagtattccactgtactcattcataaggtaggttttcttacaaaactcacaccaggtacttaaagatgtgctctgcttttttccaactacggagtgtcactgctttctagctcagtccctgcagactcttctcaactctttccctataggaaacttactccgcgtcctgcccccacctcctaaataaataaaggaatcggcgaacaccttcttcttttatg

SEQ ID NO: 106 - DNA, 4251 bp, Homo sapiens
  misc_feature: Incyte ID No: 458045.4
gcggctccgggtcggtggccccaggacagggaagagcgggcgctatggggagccggacgccagagtcccctctccacgccgtgcagctgcgctggggcccccggcgccgacccccgctgctgccgctgctgttgctgctcgtgccgccgccacccagggtcggggggcttcaacttagacgcggaggccccagcagtactctcggggcccccgggctccttcttcggattctcagtggagttttaccggccgggaacagacggggtcagtgtgctggtgggagcacccaaggctaataccagccagccaggagtgctgcagggtggtgctgtctacctctgtccttggggtgccagccccacacagtgcacccccattgaatttgacagcaaaggctctcggctcctggagtcctcactgtccagctcagagggagaggagcctgtggagtacaagtccttgcagtggttcggggcaacagttcgagcccatggctcctccatcttggcatgcgctccactgtacagctggcgcacagagaaggagccactgagcgaccccgtgggcacctgctacctctccacagataacttcacccgaattctggagtatgcaccctgccgctcagatttcagctgggcagcaggacagggttactgccaaggaggcttcagtgccgagttcaccaagactggccgtgtggttttaggtggaccaggaagctatttctggcaaggccagatcctgtctgccactcaggagcagattgcagaatcttattaccccgagtacctgatcaacctggttcaggggcagctgcagactcgccaggccagttccatctatgatgacagctacctaggatactctgtggctgttggtgaattcagtggtgatgacacagaagactttgttgctggtgtgcccaaagggaacctcacttacggctatgtcaccatccttaatggctcagacattcgatccctctacaacttctcaggggaacagatggcctcctactttggctatgcagtggccgccacagacgtcaatggggacgggctggatgacttgctggtgggggcacccctgctcatggatcggacccctgacgggcggcctcaggaggtgggcagggtctacgtctacctgcagcacccagccggcatagagcccacgcccacccttaccctcactggccatgatgagtttggccgatttggcagctccttgacccccctgggggacctggaccaggatggctacaatgatgtggccatcggggctccctttggtggggagacccagcagggagtagtgtttgtatttcctgggggcccaggagggctgggctctaagccttcccaggttctgcagcccctgtgggcagccagccacaccccagacttctttggctctgcccttcgaggaggccgagacctggatggcaatggatatcctgatctgattgtggggtcctttggtgtggacaaggctgtggtatacaggggccgccccatcgtgtccgctagtgcctccctcaccatcttccccgccatgttcaacccagaggagcggagctgcagcttagaggggaaccctgtggcctgcatcaaccttagcttctgcctcaatgcttctggaaaacacgttgctgactccattggtttcacagtggaacttcagctggactggcagaagcagaagggaggggtacggcgggcactgttcctggcctccaggcaggcaaccctgacccagaccctggctcatccagaatggggctcgagaggattgcagagagatgaagatctacctcaggaacgagtcagaatttcgagacaaactctcgccgattcacatcgctctcaacttctccttggacccccaagccccagtggacagccacggcctcaggccagccctacattatcagagcaagagccggatagaggacaaggctcagatcttgctggactgtggagaagacaacatctgtgtgcctgacctgcagctggaagtgtttggggagcagaaccatgtgtacctgggtgacaagaatgccctgaacctcactttccatgcccagaatgtgggtgagggtggcgcctatgaggctgagcttcgggtcaccgcccctccagaggctgagtactcaggactcgtcagacacccagggaacttctccagcctgagctgtgactactttgccgtgaaccagagccgcctgctggtgtgtgacctgggcaaccccatgaaggcaggagccagtctgtggggtggccttcggtttacagtccctcatctccgggacactaagaaaaccatccagtttgacttccagatcctcagcaagaatctcaacaactcgcaaagcgacgtggtttcctttcggctctccgtggaggctcaggcccaggtcaccctgaacggtgtctccaagcctgaggcagtgctattcccagtaagcgactggcatccccgagaccagcctcagaaggaggaggacctgggacctgctgtccaccatgtctatgagctcatcaaccaaggccccagctccattagccagggtgtgctggaactcagctgtcccccagggctctggaaggtcagcagctcctatatgtgaccagagttacgggactcaactgcaccaccaatcaccccattaacccaaagggcctggagttggatcccgagggttccctgcaccaccagcaaaaacgggaagctccaagccgcagctctgcttcctcgggacctcagatcctgaaatgcccggaggctgagtgtttcaggctgcgctgtgagctcgggcccctgcaccaacaagagagccaaagtctgcagttgcatttccgagtctgggccaagactttcttgcagcgggagcaccagccatttagcctgcagtgtgaggctgtgtacaaagccctgaagatgccctaccgaatcctgcctcggcagctgccccaaaaagagcgtcaggtggccacagctgtgcaatggaccaaggcagaaggcagctatggcgtcccactgtggatcatcatcctagccatcctgtttggcctcctgctcctaggtctactcatctacatcctctacaagcttggattcttcaaacgctccctcccatatggcaccgccatggaaaaagctcagctcaagcctccagccacctctgatgcctgagtcctcccaatttcagactcccattcctgaagaaccagtccccccaccctcattctactgaaaaggaggggtctgggtacttcttgaaggtgctgacggccagggagaagctcctctccccagcccagagacatacttgaagggccagagccaggggggtgaggagctggggatccctcccccccatgcactgtgaaggacccttgtttacacataccctcttcatggatgggggaactcagatccagggacagaggccccagcctccctgaagcctttgcattttggagagtttcctgaaacaacttggaaagataactaggaaatccattcacagttctttgggccagacatgccacaaggacttcctgtccagctccaacctgcaaagatctgtcctcagccttgccagagatccaaaagaagcccccagctaagaacctggaacttggggagttaagacctggcagctctggacagccccaccctggtgggccaacaaagaacactaactatgcatggtgccccaggaccagctcaggacagatgccacacaaggatagatgctggcccagggcccagagcccagagcccagctccaaggggaatcagaactcaaatggggccagatccagcctggggtctggagttgatctggaacccagactcagacattggcacctaatccaggcagatccaggactatatttgggcctgctccagacctgatcctggaggcccagttcaccctgatttaggagaagccaggaatttcccaggaccctgaaggggccatgatggcaacagatctggaacctcagcctggccagacacaggccctccctgttccccagagaaaggggagcccactgtcctgggcctgcagaatttgggttctgcctgccagctgcactgatgctgcccctcatctctctgcccaacccttccctcaccttggcaccagacacccaggacttatttaaactctgttgcaagtgcaataaatctgacccagtgcccccactgaccagaactagaaaaaaaaaaaaaagg

SEQ ID NO: 107 - DNA, 3141 bp, Homo sapiens
  misc_feature: Incyte ID No: 471362.17
  unsure 119, 1130, 1133-1134, 1136-1137: a, t, c, g, or other
tgcaaccccagtgacggcggatctcatcgtatctgtcattgtaattggtcctgatagcttccaccagcttagccaaagcgcctttgtcttccgagttcacctagtgtcgaaggcgacangtggtgcaggtcttcctgtggactagacgtcccagtcttgcctttcccttgataatgcagtaagggacccccattttacgacacagcctgaagtgatcaactatgagcccatcggctacgccacagacatgtggagcatcggggtcatctgctacatcctagtcagtggcctttcccccttcatgggagacaacgataacgaaaccttggccaacgttacctcagccacctgggacttcgacgacgaggcattcgatgagatctccgacgatgccaaggatttcatcagcaatctgctgaagaaagatatgaaaaaccgcctggactgcacgcagtgccttcagcatccatggctaatgaaagataccaagaacatggaggccaagaaactctccaaggaccggatgaagaagtacatggcaagaaggaaatggcagaaaacgggcaatgctgtgagagccattggaagactgtcctctatggcaatgatctcagggctcagtggcaggaaatcctcaacagggtcaccaaccagcccgctcaatgcagaaaaactagaatctgaagaagatgtgtcccaagctttccttgaggctgttgctgaggaaaagcctcatgtaaaaccctatttctctaagaccattcgcgatttagaagttgtggagggaagtgctgctagatttgactgcaagattgaaggatacccagaccccgaggttgtctggttcaaagatgaccagtcaatcagggagtcccgccacttccagatagactacgatgaggacgggaactgctctttaattattagtgatgtttgcggggatgacgatgccaagtacacctgcaaggctgtcaacagtcttggagaagccacctgcacagcagagctcattgtggaaacgatggaggaaggtgaaggggaaggggaagaggaagaagagtgaaacaaagccagagaaaagcagtttctaagtcatattaaaaggactatttctctaaaactcaaaaaanaannannaaactcaagatagtaaaagcacctagtgtgatagattatcggttaggtcatttgtgggttgattcttcagaaacagcagttgatacctagcagcgttattgatgggcattaatctatgttagttggcaccttaagatactagtgcagctagatttcatttagggaaatcaccagtaacttgactgaccaattgattttagagagaaagtaaccaaaccaaatatttatctgggcaaagtcataaattctccacttgaatgcgctcatgaaaaataaggccaaaacaagagttctgggccacagctcagcccagagggttcctggggatgggacgcctctctctccccaccccctgactctagagaactgggttttctcccagtactccagcaattcatttctgaaagcagttgagccactttattccaaagtacactgcagatgttcaaactctccatttctctttccccttccacctgccagttttgctgactctcaacttgtcatgagtgtaagcattaaggacattatgcttcttcgattctgaagacaggtccctgctcatggatgactctggcttccttaggaaaatatttttcttccaaaatcagtaggaaatctaaacttatcccctctttgcagatgtctagcagcttcagacatttggttaagaacccatgggaaaaaaaaaaatccttgctaatgtggtttcctttgtaaaccaggattcttatttgtgctgttatagaatatcagctctgaacgtgtggtaaagatttttgtgtttgaatataggagaaatcagtttgctgaaaagttagtcttaattatctattggccacgatgaaacagatttcaactgataaagagctggagaactccatgtactttggaatctcctccaagatagccagagtttaatacatcttcattctcaacactctccaaagaacttgacctaccttatgggttccatatttttcttcttaaatgtgcatcaatcatgccttgcccccaacctttaaatatattcttagacctggtaaatgcactcagacttgcgtctttaggaatttttaactttctttcactacattggcacttaaattttttctttataaagctttttgaaggtcataaacaaagaccataattgatgatagacctaatacatttcctctgtgtgtgtgtgtaacattccaaatactttttttttcttttccactgtttgtaaggtgcaacaatttaatatttttaagggactttttaagagttccttaagaaccaatttaaaattacttcagtgcaatcctacacagtatcaacattagaattttgatattagtcttatgttatcttccattctatttttatctgctttttgctgctagtttcaaactgccagtatttttccttttgcttttaaaatagttacaatatttttcatgatagccacagtattgccacagtttattataataaagggtttttatttgatttagcgcattcaaagcttttttctatcacttttgtgttcagaatataacctttgtgtgcgtgtatgttgtgtgtgtgcatgtgtggcgtatatgtgtgttacaggttaatgccttcttggaattgtgttaatgttctcttggtttattatgccatcagaatggtaaatgagaacactacaactgtagtcagctcacaatttttaaataaaggataccacagtgcatgctgtttgttcagtctttgcagacttctctttctttccatgctaccagttgtaaaggacacagctatatcctggaaatgaaaaacaaacactgtggtgcctagatgtgaagaactggcttatgtggttgtgttttgctatggaacagaatgatttaggaagttcttgttgatataggtagccgaatttacacatttagttcaaaatttctcttgagcatcagcttagtactatatcaatcattctagaaggatatcttatagagcaggtgtccccaatcc

SEQ ID NO: 108 - DNA, 2454 bp, Homo sapiens
  misc_feature: Incyte ID No: 336716.3
aggagggattggctgaggagcttggagagggggcgtcatcacctcacccaaaggttaaataggggttgagatatgatgctcaggagaagcgctttctttcgcgagcaccctgaaccagaccatgacccagaccctcaagtacgcctccagagtgttccatcgcgtccgctgggcgcccgagttgggcgcctccctaggctaccgagagtaccactcagcacgccggagcttggcagacatcccaggcccctctacgcccagctttctggccgaacttttctgcaagggggggctgtcgaggctacacgagctgcaggtgcagggcgccgcgcacttcgggccggtgtggctagccagctttgggacagtgcgcaccgtgtacgtggctgcccctgcactcgtcgaggagctgctgcgacaggagggaccccggcccgagcgctgcagcttctcgccctggacggagcaccgccgctgccgccagcgggcttgcggactgctcactgcggaaggcgaagaatggcaaaggctccgcagtctcctggccccgctcctcctccggcctcaagcggccgcccgctacgccggaaccctgaacaacgtagtctgcgaccttgtgcggcgtctgaggcgccagcggggacgtggcacggggccgcccgccctggttcgggacgtggcgggggaattttacaagttcggactggaaggcatcgccgcggttctgctcggctcgcgcttgggctgcctggaggctcaagtgccacccgacacggagaccttcatccgcgctgtgggctcggtgtttgtgtccacgctgttgaccatggcgatgccccactggctgcgccaccttgtgcctgggccctggggccgcctctgccgagactgggaccagatgtttgcatttgctcagaggcacgtggagcggcgagaggcagaggcagccatgaggaacggaggacagcccgagaaggacctggagtctggggcgcacctgacccacttcctgttccgggaagagttgcctgcccagtccatcctgggaaatgtgacagagttgctattggcgggagtggacacggtgtccaacacgctctcttgggctctgtatgagctctcccggcaccccgaagtccagacagcactccactcagagatcacagctgccctgagccctggctccagtgcctacccctcagccactgttctgtcccagctgcccctgctgaaggcggtggtcaaggaagtgctaagactgtaccctgtggtacctggaaattctcgtgtcccagacaaagacattcatgtgggtgactatattatccccaaaaatacgctggtcactctgtgtcactatgccacttcaagggaccctgcccagttcccagagccaaattcttttcgtccagctcgctggctgggggagggtcccaccccccacccatttgcatctcttccctttggctttggcaagcgcagctgtatggggagacgcctggcagagcttgaattgcaaatggctttggcccagatcctaacacattttgaggtgcagcctgagccaggtgcggccccagttagacccaagacccggactgtcctggtacctgaaaggagcatcaacctacagtttttggacagatagtcccatggaaagagactgtcatcatcaccctttcattcatcatagggataagattttttgtaggcacaagaccaaggtatacatcttcccctaatgcctatctgaccaaactggatagaaccaccatagtgaagtgtgaggcggccctgaccaatgtgtgaagtatgcacttggcctgactcaggaagccaggtgagaaaaccatggtctctctgcttgcttggcccttctgatcatgtatgcatcccccaaggatgaaatcagattttaactaataatgctggatggcctgaggaaagattcaactgcctctctttttgggctttcatagtgttcattgatgctgctggctaagcatttatcaaagcataagctcagtaactgtgcatctggtctgtacctggttggtccttcgtctttgcatgtaagctctttgagaggaagggtgaagccttatttgttttttatgtcccctgccagggcctgtctctgactaggtgtcaccatacacattcttagattgaatctgaaccatgtggcagaagggataagcagcttacttagtaggctctgtctacccccttccttctttgtcttgcccctaggaaggtgaatctgccctagcctggtttacggtttcttataactctcctttgctctctggccactattaagtgggtttgccccatcacttagttctcaggcagagacatctttgggcctgtccctgcccaggcctctggctttttatattgaaaatttttaaatattcacaaattttagaataaatcaaatattccattctt

SEQ ID NO: 109 - DNA, 4577 bp, Homo sapiens
  misc_feature: Incyte ID No: 995211.5
ccccacatgatttattcagtagtttttatgttcccaaattacaatttatgtctattcataagactacaaaagttaccattagaattgtctgtgcttataaaataccaactttttttttaaactgttacatatactcattaacaccagtctgcaacaagttacatagaatcagaggcacttcaaaggcttaaaaagacgtttacaacttaaatgcatttttaagaacaaaaactgatttttctttaaacctctactcgtaccttcaaattgcaagaaattaacaaatacagtggccaaaggaatctgcagcaacttcttaaaatactgttaacatctttgggtttgctgaggcttgtcagtaacttacatcaaatcctcccaaaagaagatctgattagatagatatgactaaacggttttgtagtaataatccaattttacacattaatttgctgttgcaaatctgcccaaagctacaggtaatgaaaaataaagcaagtgtaaaatggatagtctgacacttaaaaatttatacaaagtggaagttaaagtttacatatttgaaaatcacatatacactaaattaccattatctgaattttccaaagacaaattgcaccatgacagctacaaaaggcatagggtttggttttaagggcacaagaagggagggcagaggagaggaaggggacaacagataaattaacaaagtaagaccaacttggtaaggtcaatctgagacatgctgacacaaatgaaacagctttcatctttgagtcataggaaaaagacaatcattttgtatttgcgcataaaagtttaaaccaattccatgaacatcgagggttttcataacataatattttgccactgctattcacagaacactgcagatgttaaattttaattttatgttgttctaaagaaatacatgaaatgttttaaatacaatgggattttatcattaaagtgccagaatggctctttaatgaaaacaaaaaacaaagatcttcattattctatgcaaaagctttattttgaaaagttcagtgatctcataaatagagacactaagttggagttttacgcataaaactccttagtaggtgccttctgataagcagcactggatggtttgcgttctccaaggtcatagcttccttcatccttctttctcatgcgatacaccaacagcaggataagaaaaattgcaaagagaaagccaataactccaccagcaatgacagctgctaggacttctgtccgtttaaacagactgtctgagtgtttctcagtatacacatttgtatcctcttcggctgggtccattttcctttctgagtcagagaggtgaactttctctttatcagtttcttcaggtgactttgtctgagcaggtatcttgttctgtatattcagcgtcgtggtttccacttttggagcagcactagtcaacagtatctttggaagtggtcgagatgttgtcagctctggactctctacatcctcatcagctcccgagccagacgcagaagcgtagtcatcgtcatcaataggatacactcctgaagcttcttcaatggagctgttgtcaaggtacatgtctttatcagatgtcagctctgctccggattcgtgtgcgcgggctgcgccgagcgctgggcaggaggcttcgttttgccctggttgcaagcagcggctgggagcagccggtccctggggaatatgcggcgcgcgtggatcctgctcaccttgggcttggtggcctgcgtgtcggcggagtcgagagcagagctgacatctgataaagacatgtaccttgacaacagctccattgaagaagcttcaggagtgtatcctattgatgacgatgactacgcttctgcgtctggctcgggagctgatgaggatgtagagagtccagagctgacaacaactcgaccacttccaaagatactgttgactagtgctgctccaaaagtggaaaccacgacgctgaatatacagaacaagatacctgctcagacaaagtcacctgaagaaactgataaagagaaagttcacctctctgactcagaaaggaaaatggacccagccgaagaggatacaaatgtgtatactgagaaacactcagacagtctgtttaaacggacagaagtcctagcagctgtcattgctggtggagttattggctttctctttgcaatttttcttatcctgctgttggtgtatcgcatgagaaagaaggatgaaggaagctatgaccttggagaacgcaaaccatccagtgctgcttatcagaaggcacctactaaggagttttatgcgtaaaactccaacttagtgtctctatttatgagatcactgaacttttcaaaataaagcttttgcatagaataatgaagatctttgttttttgttttcattaaagagccattctggcactttaatgataaaatcccattgtatttaaaacatttcatgtatttctttagaacaacataaaattaaaatttaacatctgcagtgttctgtgaatagcagtggcaaaatattatgttatgaaaaccctcgatgttcatggaattggtttaaacttttatgcgcaaatacaaaatgattgtctttttcctatgactcaaagatgaaagctgtttcatttgtgtcagcatgtctcagattgaccttaccaagttggtcttactttgttaatttatctgttgtccccttcctctcctctgccctcccttcttgtgcccttaaaaccaaaccctatgccttttgtagctgtcatggtgcaatttgtctttggaaaattcagataatggtaatttagtgtatatgtgattttcaaatatgtaaactttaacttccactttgtataaatttttaagtgtcagactatccattttacacttgctttatttttcattacctgtagctttgggcagatttgcaacagcaaattaatgtgtaaaattggattattactacaaaaccgtttagtcatatctatctaatcagatcttcttttgggaggatttgatgtaagttactgacaagcctcagcaaacccaaagatgttaacagtattttaagaagttgctgcagattcctttggccactgtatttgttaatttcttgcaatttgaaggtacgagtagaggtttaaagaaaaatcagtttttgttcttaaaaatgcatttaagttgtaaacgtctttttaagcctttgaagtgcctctgattctatgtaacttgttgcagactggtgttaatgagtatatgtaacagtttaaaaaaaaagttggtattttataagcacagacaattctaatggtaacttttgtagtcttatgaatagacataaattgtaatttgggaacataaaaactactgaataaatcatgtggcctaatattgaaaatgtcactgttataaattttgtacatttttgatcaaatgtacatctcccctttgctaacggccgtctgctctcaaggatgacgtgggtttgatttctaagtgtttcacagtgtctgtaaatcaagaccaaagagcctgtcgatgagactgtttattaccagattcacttctgaattggccagaggaaatctgaatgtattatcctgtgtgtgtctaggtagagatattggaaggctgccaggggatttcgaagtttgcaacctttataggataactgatggcaatattaagacagacgcctgcttttgcaaataacttacaagactgtaaattccaaagatctgaatggggctttcctgatgttggtatctaaggcttaggcctatagattgatttacctttggaattgtgctccaaatgtctactgaagcttaaccgaagaactaataaatggactacagtagctcacgttacagggaaggagggtaggcagggaggctctgtgtgttaaaatgagggtctcactgctttaggattgaagtggctggaaagagtgatgcctggggaaggagatggagttatgagggtactgtggctggtactttctgtactaaacatttcctttttctattttaccactaattttgttttaaactgtgagccgtccaagtcagaagaagacagcaaaaaaaagcaacttttccaacatacaatttacttttaataaagtatgaatatttcattttgagaacattccctggaattgccacataattcattaaaaacatttttttaagcaacacttggaacagtgtttactttaaatccttaatggccttaattaattctcagattcctgccccatcacttacagaaccaattcactttagagtgactaaaaggaaacgatagcctagctttctaaagccacgctgtgtccctcaattacagagggtaggaatgggtatacctctaactgtgcaaagcagagtgaaattcaattcatagaataacaactgctgggaatatccgtgccaggaaaagaaaaatttctggcaaatattttgtcactgctgtaaagcaaaatatttgtgaaagtgccaaaataaagtctgtcatgccaaaagtaaaagaaaaaaaaaagggcggccg

SEQ ID NO: 110 - DNA, 2646 bp, Homo sapiens
  misc_feature: Incyte ID No: 238824.2
  unsure 43, 55, 93, 106: a, t, c, g, or other
ggacgcgccgcatgcgccgcgcaacccaggccacgagcacggncgcgtgcttaantcagcgcgcgcccgctaccgacgcgaggaggccccgcnctccagccccgcnccgctcgctggcctgccctcctcttgctaccctcccggcgcagagaaccccggctgctcagcgcgctccgcggtcatggagatccccgggagcttgtgcaagaaagtcaagctgagcaataacgcgcagaactggggaatgcagagagcaaccaatgtcacctaccaagcccatcatgtcagcaggaacaagagaggtcaggtggtggggaccagaggtggctttcgtggttgcacagtttggctaacaggcttgtctggagcgggaaagactactgtgagcatggccttggaggagtacctggtttgtcatggtattccatgctacactctggatggtgacaatattcgtcaaggtctcaataaaaatcttggctttagtcctgaagacagagaagagaatgttcgacgcatcgcagaagttgctaaactgtttgcagatgctggcttagtgtgcatcacaagtttcatatcaccttacactcaggatcgcaacaatgcaaggcaaattcatgaaggtgcaagtttaccgttttttgaagtatttgttgatgctcctctgcatgtttgtgaacagagggatgtcaaaggactctacaaaaaagcccgggcaggagaaattaaaggtttcactgggatcgattctgaatatgaaaagccagaggcccctgagttggtgctgaaaacagactcctgtgatgtaaatgactgtgtccagcaagttgtggaacttctacaggaacgggatattgtacctgtggatgcatcttatgaagtaaaagaactatatgtgccagaaaataaacttcatttggcaaaaacagatgcggaaacattaccagcactgaaaattaataaagtggatatgcagtgggtgcaggttttggcagaaggttgggcaaccccattgaatggctttatgagagagagggagtacttgcagtgccttcattttgattgtcttctggatggaggtgtcattaacttgtcagtacctatagttctgactgcgactcatgaagataaagagaggctggacggctgtacagcatttgctctgatgtatgagggccgccgtgtggccattcttcgcaatccagagttttttgagcacaggaaagaggagcgctgtgccagacagtggggaacgacatgcaagaaccacccctatattaagatggtgatggaacaaggagattggctgattggaggagatcttcaagtcttggatcgagtttattggaatgatggtcttgatcagtatcgtcttactcctactgagctaaagcagaaatttaaagatatgaatgctgatgctgtctttgcatttcaactacgcaacccagtgcacaatggacatgccctgttaatgcaggatacccataagcaacttctagagaggggctaccggcgccctgtcctcctcctccaccctctgggtggctggacaaaggatgacgatgttcctttgatgtggcgtatgaagcagcatgctgcagtgttggaggaaggagttctgaatcctgagacgacagtggtggccatcttcccatctcccatgatgtatgctggaccaactgaggtccagtggcattgcagagcacggatggttgcaggagccaacttttacattgttggacgagaccctgctggcatgcctcatccagaaacagggaaggatctttatgagccaagtcatggtgccaaagtgctgacgatggcccctggtttaatcactttggaaatagttccctttcgagttgcagcttacaacaagaaaaagaagcgtatggactactatgactctgaacaccatgaagactttgaatttatttcaggaacacgaatgcgcaaacttgctcgagaaggccagaaaccacctgaaggtttcatggctcccaaggcttggaccgtgctgacagaatactacaaatccttggagaaagcttaggctgttaacccagtcactccacctttgacacattactagtaacaagaggggaccacatagtctctgttggcatttctttgtggtgtctgtctggacatgcttcctaaaaacagaccattttccttaacttgcatcagttttggtctgccttatgagttctgttttgaacaagtgtaacacactgatggttttaatgtatcttttccacttattatagttatattcctacaatacaattttaaaattgtctttttatattatatttatgcttctgtgtcatgattttttcaagctgttatattagttgtaaccagtagtattcacattaaatcttgctttttttccccttaaaaaaagaaaaaaattaccaaacaataaacttggctagaccttgttttgaggattttacaagacctttgtagcgattagattttttttctacattgaaaatagaaactgcttcctttcttctttccagtcagctattggtctttccagctgttataatctaaagtattcttatgatctgtgtaagctctgaatgaacttctttactcaataaaattaattttttggcttcttaaaaaaaa

SEQ ID NO: 111 - DNA, 3328 bp, Homo sapiens
  misc_feature: Incyte ID No: 474592.3
gccggcggggtgctccgctggagtgatggctgccggcgctctctgcgtggttcttcttctcggccgctgaaacccccgcggctgcttcctgggaaggtcgtgagtcccgctgagctgtccccggtgccgccgacccgggccgtgtgcccgtggctccagccgctgccgcctcgatctcctcgtctcccgctccgccctcccttttccctggatgaacttgcgtcctttctcttctccgccatggaattctgctccgtgcttttagccctcctgagccaaagaaaccccagacaacagatgcccatacgcagcgtatagcagtaactccccagctcggtttctgtgccgtagtttacagtatttaattttatataatatatattatttattatagcatttttgatacctcatattctgtttacacatcttgaaaggcgctcagtagttctcttactaaacaaccactactccagagaatggcaacggtgattaccagtactacagctgctaccgccgcttctggtcctttggtggactacctatggatgctcatcctgggcttcattattgcatttgtcttggcattctccgtgggagccaatgatgtagcaaattcttttggtacagctgtgggctcaggtgtagtgaccctgaagcaagcctgcatcctagctagcatctttgaaacagtgggctctgtcttactgggggccaaagtgagcgaaaccatccggaagggcttgattgacgtggagatgtacaactcgactcaagggctgctgatggccggctcagtcagtgctatgtttggttctgctgtgtggcaactcgtggcttcgtttttgaagctccctatttctggaacccattgtattgttgttgcaactattggtttctccctcgtggcaaaggggcaggagggtgtcaagtggtctgaactgataaaaattgtgatgtcttggttcgtgtccccactgctttctggaattatgtctggaattttattcttcctggttcgtgcattcatcctccataaggcagatccagttcctaatggtttgcgagctttgccagttttctatgcctgcacagttggaataaacctcttttccatcatgtatactggagcaccgttgctgggctttgacaaacttcctctgtggggtaccatcctcatctcggtgggatgtgcagttttctgtgcccttatcgtctggttctttgtatgtcccaggatgaagagaaaaattgaacgagaaataaagtgtagtccttctgaaagccccttaatggaaaaaaagaatagcttgaaagaagaccatgaagaaacaaagttgtctgttggtgatattgaaaacaagcatcctgtttctgaggtagggcctgccactgtgcccctccaggctgtggtggaggagagaacagtctcattcaaacttggagatttggaggaagctccagagagagagaggcttcccagcgtggacttgaaagaggaaaccagcatagatagcaccgtgaatggtgcagtgcagttgcctaatgggaaccttgtccagttcagtcaagccgtcagcaaccaaataaactccagtggccactaccagtatcacaccgtgcataaggattccggcctgtacaaagagctactccataaattacatcttgccaaggtgggagattgcatgggagactccggtgacaaacccttaaggcgcaataatagctatacttcctataccatggcaatatgtggcatgcctctggattcattccgtgccaaagaaggtgaacagaagggcgaagaaatggagaagctgacatggcctaatgcagactccaagaagcgaattcgaatggacagttacaccagttactgcaatgctgtgtctgaccttcactcagcatctgagatagacatgagtgtcaaggcagagatgggtctaggtgacagaaaaggaagtaatggctctctagaagaatggtatgaccaggataagcctgaagtctctctcctcttccagttcctgcagatccttacagcctgctttgggtcattcgcccatggtggcaatgcacgtaagcaatgccattgggcctctggttgctttatatttggtttatgacacaggagatgtttcttcaaaagtggcaacaccaatatggcttctactctatggtggtgttggtatctgtgttggtctgtgggtttggggaagaagagttatccagaccatggggaaggatctgacaccgatcacaccctctagtggcttcagtattgaactggcatctgccctcactgtggtgattgcatcaaatattggccttcccatcagtacaacacattgtaaagtgggctctgttgtgtctgttggctggctccggtccaagaaggctgttgactggcgtctctttcgtaacatttttatggcctggtttgtcacagtccccatttctggagttatcagtgctgccatcatggcaatcttcagatatgtcatcctcagaatgtgaagctgtttgagattaaaatttgtgtcaatgtttgggaccatcttaggtattcctgctcccctgaagaatgattacagtgttaacagaagactgacaagagtctttttatttgggagccagaggagggaagtgttacttgtgctataactgcttttgtgctaaatatgaattgtctcaaaattagctgtgtaaaatagcccgggttccactggctcctgctgaggtcccctttccttctgggctgtgaattcctgtacatatttctctactttttgtatcaggcttcaattccattatgttttaatgttgtctctgaagatgacttgtgatttttttttcttttttttaaaccatgaagagccgtttgacagagcatgctctgcgttgttggtttcaccagcttctgccctcacatgcacagggatttaacaacaaaaatataactacaacttcccttgtagtctcttatataagtagagtccttggtactctgccctcctgtcagtagtggcaggatctattggcatattcgggagcttcttagagggatgaggttctttgaacacagtgaaaatttaaattagtaacttttttgcaagcagtttattgactgttattgctaagaagaagtaagaaagaaaaagcctgttggcaatcttggttatttctttaagatttctggcagtgtgggatggatgaatgaagtggaatgtgaactttgggcaagttaaatgggacagccttccatgttcatttgtctacctcttaactgaataaaaaagcctacagtttttagaaaaaacccgaattc

SEQ ID NO: 112 - DNA, 2434 bp, Homo sapiens
  misc_feature: Incyte ID No: 431338.2
  unsure 834-868, 871: a, t, c, g, or other
ggctgctaaacccaaccgcagttgactagcacctgctaccgcgcctttgcttcctggcgcacgcggagcctcctggagcctgccaccatcctgcctactacgtgctgccctgcgcccgcagccatgtgccgcaccctggccgccttccccaccacctgcctggagagagccaaagagttcaagacacgtctggggatctttcttcacaaatcagagctgggctgcgatactgggagtactggcaagttcgagtggggcagtaaacacagcaaagagaatagaaacttctcagaagatgtgctggggtggagagagtcgttcgacctgctgctgagcagtaaaaatggagtggctgccttccacgctttcctgaagacagagttcagtgaggagaacctggagttctggctggcctgtgaggagttcaagaagatccgatcagctaccaagctggcctccagggcacaccagatctttgaggagttcatttgcagtgaggcccctaaagaggtcaacattgaccatgagacccgcgagctgacgaggatgaacctgcagactgccacagccacatgctttgatgcggctcaggggaagacacgtaccctgatggagaaggactcctacccacgcttcctgaagtcgcctgcttaccgggacctggctgcccaagcctcagccgcctctgccactctgtccagctgcagcctggacgagccctcacacacctgagtctccacggcagtgaggaagccagccgggaagagaggttgagtcacccatccccgaggtggctgcccctgtgtgggaggcaggttctgcaaagcaagtgcnnnnnnnnnnnnnnnnnnnnnnnnnnnnnnnnnnntgngctccagcagcctgtttgggaagcagcagtctctccttcagatactgtgggactcatgctggagaggagccgcccacttccaggacctgtgaataagggctaatgatgagggttggtggggctctctgtggggcaaaaaggtggtatgggggttagcactggctctcgttctcaccggagaaggaagtgttctagtgtggtttaggaaacatgtggataaagggaaccatgaaaatgagaggaggaaagacatccagatcagctgttttgcctgttgctcagttgactctgattgcatcctgttttcctaattcccagactgttctgggcacggaagggaccctggatgtggagtcttcccctttggccctcctcactggcctctgggctagcccagagtcccttagcttgtacctcgtaacactcctgtgtgtctgtccagccttgcagtcatgtcaaggccagcaagctgatgtgactcttgccccatgcgagatatttatacctcaaacactgggcctgtgagccctttccaagtcagtggagagccctgaaaggagcctcacttgaatccagctcagtgctctgggtggccccctgcaggtggcccctgaccctgcgttgcagcagggtccacctgtgagcaggcccgccctggggcctcttcctggatgtgccctctctgagttctgtgctgtctcttggaggcagggcccaggagaacaaagtgtggaggcctcggggagtggcttttccagctctcatgccccgcagtgtggaacaaggcagaaaaggatcctaggaaataagtctcttggcggtccctgagagtcctgctgaaatccagccagtgttttttgtggtatgagaacaggcaaaaagagatgccccgagatagaaggggagccttgtgtttctttcctgcagacgtgagatgaacactggagtgggcagaggtggcccaggaccatggcacccttagagtgcagaagctggggggagaggctgcttcgaagggcaggactggggataatcagaacctgcctgtcacctcagggcatcactgaacaaacatttcctgatgggaactcctgcggcagagcccaggctggggaagtgaactacccagggcagcccctttgtggcccaggataatcaacactgttctctctgtaccatgagctcctccaggagattatttaagtgtattgtatcattggttttctgtgattgtcataacattgtttttgttattgttggtgctgttgttatttattattgtaatttcagtttgcctctactggagaatctcagcaggggtttcagcctgactgtctccctttctctaccagactctacctctgaatgtgctgggaacctcttggagcctgtcaggaactcctcactgtttaaatatttatttattgtgacaaatggagctggtttcctagatatgaatgatgtttgcaatccccattttcctgtttcagcatgttatattcttataaaataaaagcaaaagtcaaatatgaaaaaaaaagggcggccgccgactagtgaggg

SEQ ID NO: 113 - DNA, 14835 bp, Homo sapiens
  misc_feature: Incyte ID No: 412631.5
  unsure 7754-7788, 11011-11037: a, t, c, g, or other
cgcccgggcaggtggcggcagagctgaagtgagcggagccaccaggaggccatgtcgggtgaggacgctgaggtccgggcagtctctgaagatgtctccaatggaagcagtggctcgcccagccctggggacacactgccctggaaccttgggaaaacgcagcggagccggcgcagcgggggtggcgctgggagcaacgggagtgtcctggacccagctgagcgggcggtcattcgcatcgcagatgagcgggatcgtgtgcagaagaaaaccttcaccaagtgggtcaacaagcacctcatcaaggcccagaggcacatcagtgacctgtatgaagacctccgcgatggccacaacctcatctccctgctggaggtcctctcgggggacagcctgccccgggagaaggggaggatgcgtttccacaagctgcagaatgtccagattgccctggactacctccggcaccgccaggtgaagctggtgaacatcaggaatgatgacatcgctgacgggaaccccaagctgacccttggcctcatctggacaatcattctgcacttccagatctcagatatccaggtgagtgggcagtcggaggacatgacggccaaggagaagctgctgctgtggtcgcagcgaatggtggaggggtaccagggcctgcgatgcgacaacttcacctccagctggagagacggccgcctcttcaatgccatcatccaccggcacaagcccctgctcatcgacatgaacaaggtgtaccggcagaccaacctggagaacctggaccaggccttctctgtggcggagcgggacctgggagtgacgcggctcctggaccctgaggacgtggatgtccctcagcccgacgagaagtccatcatcacctacgtctcgtcgctgtatgacgccatgccccgcgtgccggacgtgcaggatggggtgagggccaacgagctgcagctgcgctggcaggagtaccggaactggtgctgctgctgcttcagtggatgcgacaccacacggccgcctttgaggaacgcaggttcccctccagcttcgaggagattgagatcctgtggtctcagttcctgaagtttaaggagatggagctaccagccaaggaggccgacaagaacaggtccaagggcatctaccaatccctggagggagcggtgcaagcaggccagctcaaggtgccccctggctaccacccgctggatgtggagaaggagtggggcaagctgcacgtggccatcctggagcgggagaagcagctccgcagcgagtttgagaggctggagtgtcttcagcgcatcgtgaccaagctgcagatggaggcggggctgtgtgaggagcagctgaaccaggccgacgccctgctgcagtcggatgtccggctgctggctgcaggcaaagtgccacagcgggcgggggaggtggaacgggacttggacaaggcggatagcatgatccggctgctcttcaacgacgtgcagaccctcaaggatggacggcacccgcagggcgagcagatgtaccgcagggtgtaccgtctgcacgagcgcctggtagccatccgcaccgagtacaacctacggctgaaggcaggcgtggcggcccctgcaacccaggtggcccaggtgactctgcagagtgtgcagaggcgccccgagctggaggactccactctgcgctacctgcaggacctgctggcctgggtggaggagaaccagcaccgtgtggatggcgctgagtggggtgtggacctgcccagcgtggaggcgcagctgggcagccaccgaggcctgcaccagtccatcgaagaattccgggccaagatcgagcgggcacggagtgacgagggccagctctcccccgccacccggggtgcctaccgtgactgcctgggtcggctggacctgcagtacgccaagctgctgaactcctccaaggcccgcctcaggtccctggagagcttgcacagctttgtggcagccgccactaaggagctaatgtggctgaatgagaaggaggcggaggaggtgggcttcgactggagcgaccgcaacaccaacatgaccgccaagaaggagagctactcggcgctgatgcgggagctggagctgaaggagaagaagatcaaggagctccaaaatgctggggaccggctgctgcgggaggaccacccggcccggcccacggtggagtccttccaggcggccctgcagacgcagtggagctggatgctacagctgtgctgctgtatcgaggcacacctgaaggagaacgctgcctactttcagttcttctcagatgtgcgggaggccgaggggcagttgcagaagctgcaggaggcactgcgtaggaaatacagttgtgatcgctccgccaccgtcacccggctggaggacctgctgcaggatgcccaggacgagaaggaacagctgaacgagtacaagggccacctctcaggcctggccaagcgggccaaggccgtcgtgcagctgaagccccgccacccagcccaccccatgcggggccgcctgcccctgctggccgtgtgcgactataagcaggtggaggtgactgtgcacaagggtgacgagtgccagctggtgggccctgcacagccgtcccactggaaggtgctcagcagctccggcagcgaggccgccgtgccctccgtgtgcttcctggtgcccccgctcaaccaggaggcccaggaggccgtcaccaggctggaggcccagcaccaggccctggtcacgctgtggcaccagttgcacgtggacatgaagagccttctggcctggcagagccttcgccgcgacgtgcagctcatccgctcgtggtccctggccacgttccgcaccctgaagccagaggagcagcgccaagccctgcacagcctggagctgcactaccaggccttcctgcgggacagccaggacgcgggcgggcttcggacccgatgggaccggctgatggctgagcgcgagtacggctcctgcagccaccactaccagcagctgctgcagagcctggaacagggtgcacaggaagagtctcgctgccagcgctgcatctccgagctcaaagacatccggctgcagctggaggcctgtgagacgcgcaccgtgcaccgcctgcggctgccgctggacaaagagccggcacgggagtgtgcccagcgcatcgccgagcagcagaaggcacaggcagaggtggaggggctgggcaagggggtcgcccggctctctgccgaggccgagaaggtcttggccctaccagagccatcgcctgcggcccccacgctgcgctcggagctggagctgacgctgggcaagctggagcaggtccgcagcctgtctgccatctacctggagaagctcaagaccatcagcctggtgatccgcggcacgcagggggccgaggaggtgctcagggcccacgaggagcagctcaaggaggcccaggccgtgccggccaccctcccggagctcgaggccaccaaggcctctctgaagaagctgcgggcccaggccgaggcacagcagcccacgttcgacgccctgcgggatgagctgcggggggcacaggaggtgggggagcgactgcagcagcggcacggggagcgggacgtggaggtggagcgctggcgggagcgggtcgcccagttgcttgagcgctggcaggctgtgctggcccagaccgacgtgcggcagcgcgagctcgagcaactgggccgccagctgcgttactaccgcgagagtgcagaccccttgggcgcctggctgcaggacgccaggcggcggcaggagcagatccaggccatgccgctggccgacagccaggctgtgcgggagcagctgcggcaggagcaggccctgctggaggagatcgagcgccacggcgagaaggtcgaggagtgccagaggtttgcgaaacagtacatcaacgccatcaaggactatgaactccagctggtgacgtacaaggcgcagcttgagccggtggcctccccggccaagaagcccaaggtccagtcgggatcagagagtgtcatccaggagggctaaccctggctctactccacagtacgtggacctgcgtacgcactacagcgagctgaccacactgacgagccagtacatcaagttcatcagcgagactctgcggcgcatggaggaggaggagaggctggctgagcagcagcgggcagaggagcgcgagcggctggccgaggtggaggccgcgctggagaagcagcggcagctggccgaggcgcacgcccaggcaaaggcacaggcggagcgggaggcgaaggagctgcagcagcgcatgcaggaggaggtggtgcggcgggaggaggcggcggtggacgcgcagcagcagaagcgcagcattcaggaggagctgcagcagctgcggcagagctcggaggcggagatccaggccaaggcccggcaggcagaggcggctgagcgcagccggctgcgcatcgaggaggagatccgcgtggtgcgcctgcagttggaggccaccgagcgccagcgtggcggggctgagggggagctgcaggcactgcgtgcacgggcggaggaggctgaggcacaaaagcgacaggcgcaggaggaggccgagcgcttgcggaggcaggtgcaggacgagagccagcgtaagcggcaggcggaggtggagctggcctcgcgcgtgaaggccgaggccgaggcggcgcgcgagaagcagcgggccctgcaggccctggaggagctgcggctgcaggcggaggaggcggagcggcgcctgcggcaggccgaggtggagcgagcgcggcaggtacaggtggccctggagacggcgcagcgcagtgcagaggcggagctgcagagcaaacgcgcctccttcgccgagaagacggcacagctggagcgctccctgcaggaggaacacgtggctgtggcacagctgcgggaggaggctgagcggcgggcacagcagcaggccgaggccgagcgggcgcgcgaggaggcagagcgggagctggagcgctggcagctcaaggccaacgaggcgctacggctgcggctgcaggcggaggaggtggcgcagcagaagagcctggcgcaggccgaggctgagaagcagaaggaggaggcggagcgcgaggcgcggcggcgcggcaaggcggaggagcaggccgtccggcagcgggagctggctgaacaagagctggagaagcagcggcagctggcggaaggcaccgcgcagcagcgcctggccgcggagcaggagttgatccggctgcgggccgagacggagcagggggagcagcagcggcagctgctggaggaggagctggcccggctgcagcgtgaggcggctgcagccacgcagaaacggcaggagctggaagccgagctggccaaggtgcgggccgagatggaggtgctgctggccagcaaggcgagggctgaggaggagtcgcgctccaccagcgagaagtccaagcagaggctggaggccgaggccggccggttccgcgagctggccgaggaggccgcccgcctgcgtgccctggcggaagaggccaagcggcagcggcagctggccgaggaagacgcggcgcggcagcgggccgaggcggagcgggtgcttgcggagaagctggccgccatcggcgaggccacgcggctcaagacggaggcggagatcgcgctcaaggagaaggaggcggagaacgagcgcctgcggcggctggcggaggacgaggccttccagcggcggcggctggaggagcaggccgcgcaacacaaggctgacatcgaggagcgcctggcccagctgcgcaaggcatcggacagcgagctggagcggcagaaggggctggtggaggacacgctgaggcagcggcggcaggtggaggaagagatcctggcgctgaaggcgagcttcgagaaggcggccgctggcaaggcggagctggagctggagctgggacgcatccgcagcaacgcggaggacacgctgcgcagcaaggagcaggccgagctggaggctgcgaggcagcggcagctggcggcggaggaggagcggcggcgccgtgaggctgaggagcgcgtgcagaagagcctggcggccgaggaggaggccgcacggcagcggaaggcggcgctggaggaagtcgagcggctgaaagccaaggtggaggaggcgcggcgcctgcgggagcgagcggagcaggagtcggcgcggcagctgcagctggcccaggaggccgcccagaagcggctgcaggcggaagagaaggcacacgccttcgcggtgcagcagaaggagcaggagctacagcagacgctgcagcaggagcagagcgtgctggaccagctgcgcggcgaggcggaggcggcccggcgggcggctgaggaggcggaggaggcccgggtgcaggcggagcgtgaggcggcgcagtcccggcggcaggtggaagaggccgagcggctgaagcagtcggcagaggagcaggcacaggcccgggctcaggcacaggcggctgcagagaagctgcgcaaggaggccgagcaagaggcggcacggcgggcacaggcggagcaggcggccctgcggcagaagcaggcagctgacgcggagatggagaagcataagaaattcgccgagcagacgctgcggcagaaggcgcaggtggagcaggagctgacaacactgcggctacagctggaggagaccgaccaccagaagaacctgctggacgaggagctgcagcggctgaaggcggaggccacggaggccgcacgccagcgcagccaggtggaggaggagctcttctcggtgcgcgtgcagatggaggagctgagcaagctcaaggcacgcatcgaggctgagaaccgcgcactcatcttgcgtgacaaggacaatacgcagcgcttcctgcaggaggaggctgagaagatgaagcaggtggcggaggaggccgcgcggctgagtgtggcggcccaagaggctgcgcgactgcggcagctggcagaggaggacctggcacagcagcgggccttggcagagaagatgctcaaggagaagatgcaggcggtgcaggaggccacgcgactcaaggctgaggcggaactgctgcagcagcagaaggagcttgcgcaggagcaggcgcggcggctgcaggaggacaaggagcagatggcgcagcagctggcggaggagacgcagggcttccagcggacgctggaggccgagcggcagcggcagctggagatgagcgctgaggctgagcgcctcaagctgcgtgtggccgagatgagccgagcccaggcccgcgctgaggaggacgcccagcgcttccggaagcaggcggaggagatcggtgagaagctgcaccgcacggagctcgccacccaggagaaggtgaccctggtgcagacactggagatccagcgacagcagagtgaccatgatgccgagcgcctgcgggaggccatcgctgagctggagcgtgagaaggagaagctccaacaggaggccaaactgctgcagctcaagtctgaggagatgcagacggtgcagcaggagcagctgctgcaggagacgcaggccctgcagcaaagcttcctctctgaaaaggacagcctgctacagcgggagcgcttcatcgagcaggagaaggccaagctggagcagctcttccaggacgaggtggccaaggcacagcagctgcgtgnnnnnnnnnnnnnnnnnnnnnnnnnnnnnnnnnnngaacggcagcggctggtggccagcatggaggaggcgcggcggcggcagcatgaggccgaggagggcgtgcggcgcaagcaggaggagctgcagcagctggagcagcagcggcggcagcaggaggagctgctggctgaggagaaccagaggctgcgtgagcagctgcagctcctggaggagcagcaccgggccgcgctggcgcactcagaggaggtcactgcctcgcaggtggctgccacaaagaccctgcccaatggccgggatgcacttgatggccccgcggcagaggcagagccggagcacagcttcgatggcctgcggcggaaggtgtcagctcagaggctgcaggaggccggcatcctgagtgcggaggagctgcagcggttggcgcagggccacaccacggtggacgagctcgcacggcgggaagacgtgcgccactacctgcagggccgcagcagtatcgcagggctgttgctgaaggccaccaatgagaagctgagtgtttacgccgccctgcagaggcagctgctgagtcccggcacggccctcatcctgctggaggcgcaggcggcctcaggcttcctgctggaccctgtgcggaaccggcggctgaccgtcaacgaggctgtgaaggagggtgtggtgggccccgagctgcaccacaagctgctgtcggccgagcgcgccgtcactggctacaaggacccctacactggccagcagatctctctcttccaagccatgcagaagggcctcatcgtccgggagcacggcatccgcctgctggaggcccagatcgccacgggcggcgttatcgaccccgtgcacagccaccgcgtgcccgtggacgtggcctaccggcgcggctacttcgacgaggagatgaaccgcgtcctggcggaccccagcgacgacaccaagggcttctttgaccccaacacgcacgagaacctcacgtacctgcagctactggagcgctgcgtggaggaccccgagacgggcctgtgccttctgccactcacggataaggctgccaagggcggggagctggtctacactgactccgaggcccgggacgtctttgagaaggccaccgtgtctgcgccgttcggcaagttccaggggcaagacggtgaccatttgggagatcatcaactcggaatacttcacggcagagcagcggcgggacctgctgcggcagttccgcacgggccggatcacagtggagaagatcatcaagatcatcatcacggtggtggaggagcaggagcagaagggccggctttgctttgagggcctgcgcagcctggtgccagccgccgagctgctggagagcagggtcatcgaccgcgagctctaccagcagctgcagcgaggtgagcgctctgtgcgagacgtagccgaggtggacactgtgcggcgggctctccggggtgccaacgtcatcgcgggtgtatggctggaggaggcggggcagaagctgagtatctacaatgccctgaagaaagacctgctgccatccgacatggccgtggccctgttggaagcccaggccggcaccgggcacatcatcgaccccgccaccagcgcccggctgaccgtggacgaggcagtgcgtgctggcctggtgggccccgagtttcatgagaagctgctatcagccgagaaggctgtgacagggtacagggacccctacacagggcagagcgtctccctgttccaggccctgaagaagggcctcattccccgggagcagggcctgcgcctgttggacgcccagctgtccacgggcggcatcgtggaccccagcaagagccaccgcgtgcccctggatgtcgcctgcgcccgaggctgcctggatgaggagaccagcagggccctgtcggcaccaagggccgacgccaaggcctacagtgaccccagcacaggggagccggccacctacggcgagctccagcagcggtgccggcccgaccagctgaccgggctgagcctgctgccgctctcagaaaaggctgctcgggcccggcaggaggagctctactcagagctgcaggcccgtgagacctttgaaaagaccccggttgaggtccccgtgggtggcttcaagggcaggacggtgacggtgtgggagctcatcagctctgagtacttcactgcggagcagcggcaggagctgttgcgtcagttccgcacgggcaaggtcaccgtggagaaggtcatcaagattctcattaccatcgtggaggaggtggagaccctgcggcaggagaggctgtccttcagcggcctccgtgcccctgtgccagccagcgagctcctggcttccggggtcctcagcagagcccagtttgagcagctcaaggacggcaagacgacggtcaaggacctttcggagctgggctccgtgcggacgctgctgcagggcagtggctgcctcgccggcatctacctggaggacaccaaggagaaggtgtccatctacgaggccatgcgccggggcctgctgagagccacaacggctgcgctcctgctggaggcgcaggcggccactggcttcctggtggaccccgtgcggaaccagcgcctgtatgtccacgaggccgtgaaggcgggcgtggtgggccccgagcttcacgagcagctgctgtctgccgagaaggccgtcaccggctacagagacccctactcgggcagcaccatctccctcttccaggccatgcagaagggcctggttctccggcagcacggcatccgcctgctggaggcccagatcgccacgggcggcatcatcgaccccgtgcacagccaccgcgtgcctgtggacgtggcctaccagcgcggctacttcagtgaggagatgaaccgcgtcctggcggaccccagcgacgacaccaagggcttctttgaccccaacacgcatgagaacctcacgtacaggcagctgctggagcggtgcgtggaggaccccgagacgggcctgcgccttctgccactgaaaggggcggagaaggctgaggtggtggagaccacgcaggtgtacactgaggaggagacaagaagggcatttgaagagacacagatcgacattcccggcggcggcagccacggcggctccaccatgtccctgtgggaggtgatgcagtcggacctgatccccgaggagcagcgggcccagctgatggctgacttccaggccggccgggtgaccaaggaacgnnnnnnnnnnnnnnnnnnnnnnnnnnntgagaagacagagatcatccgccagcagggtctggcctcctacgactacgtgcgccgccgcctcacggctgaggacctgttcgaggctcggatcatctctctcgagacctacaacctgctccgggagggcaccaggagcctccgtgaggctctcgaggcggagtccgcctggtgctacctctatggcacgggctccgtggctggtgtctacctgcccggttccaggcagacactgagcatctaccaggccctcaagaaagggctgctgagtgccgaggtggcccgcctgctgctggaggcacaggcagccacaggcttcctgctggacccggtgaagggggagcggctgactgtggatgaggctgtgcggaagggcctcgtggggcccgagctgcacgaccgcctgctctcggctgagcgggcggtcaccggctaccgtgacccctacaccgagcagaccatctcgctcttccaggccatgaagaaggagctgatccctactgaggaggccctgcggctgctggatgcccagctggccaccggcggcatcgtggacccccgcctgggcttccaccttcccctggaggtggcttaccagcgtggctacctcaacaaggacacgcacgaccagctgtcagagcccagcgaggtgcgcagctacgtggacccgtccaccgacgagcgcctcagctacacgcagctgctcaggcggtgccgtcgtgacgacggcaccggccagctgctcctgccactgtcggacgcccgcaagctgaccttccgtggcctgcggaagcagatcaccatggaggagctggtgcgctcgcaggtcatggacgaggccacggcgctgcagctgcgggagggcctgacctccatcgaggaggtcaccaagaacttgcagaagttcctggaaggcaccagctgcatcgctggtgtcttcgtggacgccaccaaggaacggctctcggtgtaccaggccatgaagaagggcatcatccgccccggcacagcctttgagctcctggaggcgcaggcggccaccggttacgtcatcgaccccatcaagggactgaagctgacggtggaggaggctgtgcgtatgggcattgtgggccccgagttcaaggacaagctgctgtcggccgagcgcgccgtcactgggtacaaggacccctactctgggaagctcatctccctcttccaggccatgaagaagggcctgatcctgaaggaccatggcatccgcctgctggaggcccagatcgccacgggcggcatcatcgaccctgaggagagccaccggctgcccgtggaggtggcctacaagcgcggcctcttcgatgaggagatgaacgagatcctgaccgacccctcggacgacaccaagggcttctttgaccctaacacggaggagaacctcacctacctgcagctgatggagcgttgtatcactgacccccagacgggcctgtgtctcttgccgctgaaggagaagaagcgggagcggaagacgtcctccaagtcctccgtgcgcaagcgccgagtggtcatcgtggaccccgagacgggcaaggagatgtcagtgtacgaggcctaccgcaagggcctgattgaccaccagacgtacctggagctgtccgagcaggagtgcgagtgggaggagatcaccatctcctcctcggacggcgtggtcaagtccatgatcatcgaccgccgctccgggcgccagtacgacatcgatgatgccatcgccaagaacctcatcgaccgctcggcactggaccagtaccgcgccggcacgctctccatcaccgagttcgccgacatgctctcgggcaacgccggtggtttccgctcccgttcctcctcggtgggatcctcctcctcctaccccatcagccccgccgtctccaggacccagctggcctcctggtcagaccccactgaggagacgggccccgtggctggcatcctggacacggagacgctggagaaggtgtccatcaccgaggccatgcaccggaacctggtggataacatcacggggcagcggctgctggaggcgcaggcctgcaccgggggcatcatcgaccccagcaccggtgagcgcttccctgtcaccgacgccgtcaacaagggcctggtggacaagatcatggtggaccgcatcaacctggcccagaaggccttctgcggcttcgaggacccacgcaccaagaccaagatgtcggccgcccaggccctgaagaagggctggctctactacgaggccggccagcgcttcctggaggtgcagtacctgaccggcggcttgatcgagcccgacacgccgggccgcgtgcccctggacgaggccctgcagcgcggcacggtggacgcccgcaccgcacagaagctgcgtgacgtgggcgcctactccaagtacctcacctgccctaagaccaagctcaagatctcctataaggacgcgctggaccgcagcatggtggaggagggcacggggctgcggctgctggaggctgccgcgcagtccaccaagggctactacagcccctacagcgtcagcggctccggctctaccgctggctcccgcaccggctcgcgcaccggctcccgggccggctcccgccgcggcagctttgacgccaccggctccggcttctccatgaccttctcttcatcctcctactcctcctcgggctacggccgccgctacgcctcggggtcctcggcctccctggggggccctgagtctgccgtggcctgaggctgcctgcgcccaccccgctctgcatgcggcccagcccggctcccaccgaggcgcgggggccgttttcaacgcttaaaggtgtcttcctcccaagtggtgcctaaagtttaaccaaaaagaccagactaatatattaatatatatctgctgtccagacagcctgtatcttgggggacagggctggcccagccctgctggccgcctcaccccctcgggtctcctcactcccttctacctgccactcacacagccaggtgccttggagggtcccaagctgggccccagcccaccctcctgtcttcccagggtagcccgcctgccagtcctagctgcacagggcagctgggcccaaccctgtctgtagagggccctggtgtttctagcactggcctgcacggtgggccttgctggggacggggggccccagtcagcctctctcccagtctacccagagaagccccttccccatgggaagacgaggccctcgggcccagcccccacagtgctgtctgatctgtgctttccagctcaccccccacactcactcctgagacccctggcctccggcgtcagcctccagcctctgttcccctagtaagtgccttccatgtcggcctctaaccccaggccccgaggacccagacccagtggggaggcggacgttccagccggcatggctgggaactgcagacctgtcctcctggtgggtccaggggcccctccagcttgtggagccccacactggggtgccgcctgcccgtctctctcccatggagccccagccccctttgggcccagggacaccagccaggctctgtgctgaccctcctgttgcacccagccctggtctcagcagcgaccacccctgcctccaccctccgagctttgcatgttccactaaccccgggcgggtggcaggtggaggtgtcaggctgctggcgcctctgcaagggcagaacactaacctgaccgtgggcggggccttgcggtatccgcccccaataaaagcaattccaaccttacacacc

SEQ ID NO: 114 - DNA, 2433 bp, Homo sapiens
  misc_feature: Incyte ID No: 350480.6
gaaacttcttgcccttttaggtgccacttcccagatgggaagtcttcttggtggggaagaggaggagtgggcaacaaggggatcctccatggtgggaggaatgggcttgaagttgtgtgtcctaagctgtggagaccaaatcagaaattccttggaccccaaaggcctttgggaaccagagcactaaaggagtggggaggtgcagcacctggctggggaacaggaatttggggtgcagcccccttggtgcttctgccccatgccctaccctgctgagtagccctgactctgcagggattggggtgaccctgttcattgccctgtatgactatgaggctcgaactgaggatgacctcaccttcaccaagggcgagaagttccacatcctgaacaatactgaaggtgactggtgggaggctcggtctctcagctccggaaaaactggctgcattcccagcaactacgtggcccctgttgactcaatccaagctgaagagtggtactttggaaagattgggagaaaggatgcagagaggcagctgctttcaccaggcaacccccagggggcctttctcattcgggaaagcgagaccaccaaaggtgcctactccctgtccatccgggactgggatcagaccagaggcgatcatgtgaagcattacaagatccgcaaactggacatgggcggctactacatcaccacacgggttcagttcaactcggtgcaggagctggtgcagcactacatggaggtgaatgacgggctgtgcaacctgctcatcgcgccctgcaccatcatgaagccgcagacgctgggcctggccaaggacgcctgggagatcagccgcagctccatcacgctggagcgccggctgggcaccggctgcttcggggatgtgtggctgggcacgtggaacggcagcactaaggtggcggtgaagacgctgaagccgggcaccatgtccccgaaggccttcctggaggaggcgcaggtcatgaagctgctgcggcacgacaagctggtgcagctgtacgccgtggtgtcggaggagcccatctacatcgtgaccgagttcatgtgtcacggcagcttgctggattttctcaagaacccagagggccaggatttgaggctgccccaattggtggacatggcagcccaggtagctgagggcatggcctacatggaacgcatgaactacattcaccgcgacctgagggcagccaacatcctggttggggagcggctggcgtgcaagatcgcagactttggcttggcgcgtctcatcaaggacgatgagtacaacccctgccaaggttccaagttccccatcaagtggacagccccagaagctgccctctttggcagattcaccatcaagtcagacgtgtggtcctttgggatcctgctcactgagctcatcaccaagggccgaatcccctacccaggcatgaataaacgggaagtgttggaacaggtggagcagggctaccacatgccgtgccctccaggctgcccagcatccctgtacgaggccatggaacagacctggcgtctggacccggaggagaggcctaccttcgagtacctgcagtccttcctggaggactacttcacctccgctgaaccacagtaccagcccggggatcagacatagcctgtccgggcatcaaccctctctggcggtggccaccagtccttgccaatccccagagctgttcttccaaagcccccaggctggcttagaaccccatagagtcctagcatcaccgaggacgtggctgctctgacaccacctagggcaacctacttgttttacagatggggcaaaaggaggcccagagctgatctctcatccgctctggccccaagcactatttcttccttttccacttaggcccctacatgcctgtagcctttctcactccatccccacccaaagtgctcagaccttgtctagttatttataaaactgtatgtacctccctcacttctctcctatcactgctttcctactctccttttatctcactctagtccaggtgccaagaatttcccttctaccctctattctcttgtgtctgtaagttacaaagtcaggaaaagtcttggctggacccctttcctgctgggtggatgcagtggtccaggactggggtctgggcccaggtttgagggagaaggttgcagagcacttcccacctctctgaatagtgtgtatgtgttggtttattgattctgtaaataagtaaaatgacaatatgaatcctcaaaccatgaaatacccttgaaccttcctttgggagcgggggtggtcaatagggggtgaacggacagatatggctacaggcagcagcaggggaagctggagagggccctaatgcctaccaagcacggggcatccaaggtgtggagttttagaacacccagag

SEQ ID NO: 115 - DNA, 1921 bp, Homo sapiens
  misc_feature: Incyte ID No: 350521.15
cccgcaatctctgcgcccacaaaatacaccgacgatgcccgatctactttaagggctgaaacccacgggcctgagagactataagagcgttccctaccgccatggaacaacggggacagaacgccccggccgcttcgggggcccggaaaaggcacggcccaggacccagggaggcgcggggagccaggcctgggctccgggtccccaagacccttgtgctcgttgtcgccgcggtcctgctgttggtctcagctgagtctgctctgatcacccaacaagacctagctccccagcagagagcggccccacaacaaaagaggtccagcccctcagagggattgtgtccacctggacaccatatctcagaagacggtagagattgcatctcctgcaaatatggacaggactatagcactcactggaatgacctccttttctgcttgcgctgcaccaggtgtgattcaggtgaagtggagctaagtccctgcaccacgaccagaaacacagtgtgtcagtgcgaagaaggcaccttccgggaagaagattctcctgagatgtgccggaagtgccgcacagggtgtcccagagggatggtcaaggtcggtgattgtacaccctggagtgacatcgaatgtgtccacaaagaatcaggtacaaagcacagtggggaagccccagctgtggaggagacggtgacctccagcccagggactcctgcctctccctgttctctctcaggcatcatcataggagtcacagttgcagccgtagtcttgattgtggctgtgtttgtttgcaagtctttactgtggaagaaagtccttccttacctgaaaggcatctgctcaggtggtggtggggaccctgagcgtgtggacagaagctcacaacgacctggggctgaggacaatgtcctcaatgagatcgtgagtatcttgcagcccacccaggtccctgagcaggaaatggaagtccaggagccagcagagccaacaggtgtcaacatgttgtcccccggggagtcagagcatctgctggaaccggcagaagctgaaaggtctcagaggaggaggctgctggttccagcaaatgaaggtgatcccactgagactctgagacagtgcttcgatgactttgcagacttggtgccctttgactcctgggagccgctcatgaggaagttgggcctcatggacaatgagataaaggtggctaaagctgaggcagcgggccacagggacaccttgtacacgatgctgataaagtgggtcaacaaaaccgggcgagatgcctctgtccacaccctgctggatgccttggagacgctgggagagagacttgccaagcagaagattgaggaccacttgttgagctctggaaagttcatgtatctagaaggtaatgcagactctgccatgtcctaagtgtgattctcttcaggaagtcagaccttccctggtttaccttttttctggaaaaagcccaactggactccagtcagtaggaaagtgccacaattgtcacatgaccggtactggaagaaactctcccatccaacatcacccagtggatggaacatcctgtaacttttcactgcacttggcattatttttataagctgaatgtgataataaggacactaaaaaaataatgccaagtgctctggaaagttcatgtatctagaaggtaatgcagactctgccatgtcctaagtgtgattctcttcaggaagtcagaccttccctggtttaccttttttctggaaaaagcccaactggactccagtcagtaggaaagtgccacaattgtcacatgaccggtactggaagaaactctcccatccaacatcacccagtggatggaacatcctgtaacttttcactgcacttggcattatttttataagctgaatgtgataata

SEQ ID NO: 116 - DNA, 1609 bp, Homo sapiens
  misc_feature: Incyte ID No: 445076.9
  unsure 446-467, 1177, 1334-1467: a, t, c, g, or other
cagtatccctcctgacaaaactaacaaaaatcctgttagccaaataatcagccacattcatatttaccgtcaaagtttttatcctcattttacagcagtggagagcgattgccccgggtcccacgttaggaagagagagaactgggatttgcacccaggcaatctggggacagagctgtgatcacaactccatgagtcagggccgagccagccccttcaccaccagccggccgcgccccgggaaggaagtttgtggcggaggaggttcgtacgggaggagggggaggcgcccacgcatctggggctgactcgctctttcgcaaaacgtctgggaggagtccctggggccacaaaactgcctccttcctgaggccagaaggagagaagacgtgcagggaccccgcgcacaggagctgccctcgcgacatgggtcacccgccgctgcnnnnnnnnnnnnnnnnnnnnnnacacctgcgtcccagcctcttggggcctgcggtgcatgcagtgtaagaccaacggggattgccgtgtggaagagtgcgccctgggacaggacctctgcaggaccacgatcgtgcgcttgtgggaagaaggagaagagctggagctggtggagaaaagctgtacccactcagagaagaccaacaggaccctgagctatcggactggcttgaagatcaccagccttaccgaggttgtgtgtgggttagacttgtgcaaccagggcaactctggccgggctgtcacctattcccgaagccgttacctcgaatgcatttcctgtggctcatcagacatgagctgtgagaggggccggcaccagagcctgcagtgccgcagccctgaagaacagtgcctggatgtggtgacccactggatccaggaaggtgaagaagtcctggagcttgaaaatctgccgcagaatggccgccagtgttacagctgcaaggggaacagcacccatggatgctcctctgaagagactttcctcattgactgccgaggccccatgaatcaatgtctggtagccaccggcactcacgaaccgaaaaaccaaagctatatggtaagaggctgtgcaaccgcctcaatgtgccaacatgcccacctgggtgacgccttcagcatgaaccacattgatgtctcctgctgtactaaaagtggctgtaaccanccagacctgggtgtccagtaccgcagtggggctgctcctcagcctgggcctgcccatctcagcctcaccatcaccctgctaatgactgccagactgtggggaggcactctcctctggacctaaacctgaaatccccctctctgccctggctggatcnnnnnnnnnnnnnnnnnnnnnnnnnnnnnnnnnnnnnnnnnnnnnnnnnnnnnnnnnnnnnnnnnnnnnnnnnnnnnnnnnnnnnnnnnnnnnnnnnnnnnnnnnnnnnnnnnnnnnnnnnnnnnnnnnnnnnncagaagagaaaagctggaggaaggccgtgggcaatgggagagctcttgttattattaatattgttgccgctgttgtgttgttgttattaattaatattcatattatttattttatacttacataaagattttgtaccagtgg

SEQ ID NO: 117 - DNA, 3224 bp, Homo sapiens
  misc_feature: Incyte ID No: 995028.4
caagaacgcccccaaaatctgtttctaattttacagaaatcttttgaaacttggcacggtattcaaaagtccgtggaaagaaaaaaaccttgtcctggcttcagcttccaactacaaagacagacttggtccttttcaacggttttcacagatccagtgacccacgctctgaagacagaattagctaactttcaaaaacatctggaaaaatgaagacttgggtaaaaatcgtatttggagttgccacctctgctgtgcttgccttattggtgatgtgcattgtcttacgcccttcaagagttcataactctgaagaaaatacaatgagagcactcacactgaaggatattttaaatggaacattttcttataaaacattttttccaaactggatttcaggacaagaatatcttcatcaatctgcagataacaatatagtactttataatattgaaacaggacaatcatataccattttgagtaatagaaccatgaaaagtgtgaatgcttcaaattacggcttatcacctgatcggcaatttgtatatctagaaagtgattattcaaagctttggagatactcttacacagcaacatattacatctatgaccttagcaatggagaatttgtaagaggaaatgagcttcctcgtccaattcagtatttatgctggtcgcctgttgggagtaaattagcatatgtctatcaaaacaatatctatttgaaacaaagaccaggagatccaccttttcaaataacatttaatggaagagaaaataaaatatttaatggaatcccagactgggtttatgaagaggaaatgcttcctacaaaatatgctctctggtggtctcctaatggaaaatttttggcatatgcggaatttaatgataaggatataccagttattgcctattcctattatggcgatgaacaatatcctagaacaataaatattccatacccaaaggctggagctaagaatcccgttgttcggatatttattatcgataccacttaccctgcgtatgtaggtccccaggaagtgcctgttccagcaatgatagcctcaagtgattattatttcagttggctcacgtgggttactgatgaacgagtatgtttgcagtggctaaaaagagtccagaatgtttcggtcctgtctatatgtgacttcagggaagactggcagacatgggattgtccaaagacccaggagcatatagaagaaagcagaactggatgggctggtggattctttgtttcaacaccagttttcagctatgatgccatttcgtactacaaaatatttagtgacaaggatggctacaaacatattcactatatcaaagacactgtggaaaatgctattcaaattacaagtggcaagtgggaggccataaatatattcagagtaacacaggattcactgttttattctagcaatgaatttgaagaataccctggaagaagaaacatctacagaattagcattggaagctatcctccaagcaagaagtgtgttacttgccatctaaggaaagaaaggtgccaatattacacagcaagtttcagcgactacgccaagtactatgcacttgtctgctacggcccaggcatccccatttccacccttcatgatggacgcactgatcaagaaattaaaatcctggaagaaaacaaggaattggaaaatgctttgaaaaatatccagctgcctaaagaggaaattaagaaacttgaagtagatgaaattactttatggtacaagatgattcttcctcctcaatttgacagatcaaagaagtatcccttgctaattcaagtgtatggtggtccctgcagtcagagtgtaaggtctgtatttgctgttaattggatatcttatcttgcaagtaaggaagggatggtcattgccttggtggatggtcgaggaacagctttccaaggtgacaaactcctctatgcagtgtatcgaaagctgggtgtttatgaagttgaagaccagattacagctgtcagaaaattcatagaaatgggtttcattgatgaaaaaagaatagccatatggggctggtcctatggaggatacgtttcatcactggcccttgcatctggaactggtcttttcaaatgtggtatagcagtggctccagtctccagctgggaatattacgcgtctgtctacacagagagattcatgggtctcccaacaaaggatgataatcttgagcactataagaattcaactgtgatggcaagagcagaatatttcagaaatgtagactatcttctcatccacggaacagcagatgataatgtgcactttcaaaactcagcacagattgctaaagctctggttaatgcacaagtggatttccaggcaatgtggtactctgaccagaaccacggcttatccggcctgtccacgaaccacttatacacccacatgacccacttcctaaagcagtgtttctctttgtcagactaaaaacgatgcagatgcaagcctgtatcagaatctgaaaaccttatataaacccctcagacagtttgcttattttattttttatgttgtaaaatgctagtataaacaaacaaattaatgttgttctaaaggctgttaaaaaaaagatgaggactcagaagttcaagctaaatattgtttacattttctggtactctgtgaaagaagagaaaagggagtcatgcattttgctttggacacagtgttttatcacctgttcatttgaagaaaaataataaagtcagaagttcagccctgagattcttactactgatgagaacattatctggatatgcccaaaaatttttaggcaaatgaaagctaccaatttaaagttacggaatctaccattttaaagttaattgcttgtcaagctcagatgtctttactgtgaatgagggagagaaacgctaaagcacagaaatgttcagaaccaaagagctggatcactcatgcttctagaaaagacattggcatcttctcattgctcatctactgtgcctggcacagccttattttctagctttctgaatgtgagttccatccatatcctttgcataacggtggtactgggctgtggagagcttggaatgtgtgtccatggggaaatgggctgttctggttattataaaacggccaagggagggctccatggcacacctctgagtaacccaggacactcctgtttgggaaatg

SEQ ID NO: 118 - DNA, 3887 bp, Homo sapiens
  misc_feature: Incyte ID No: 245008.4
cgcgtttcctgacgcgagatacgcgctcgccgccgggccgcccaggcggcgatgacacggcgcccgcggcggcccggaggcgccgggtgggccgtttgctgaccggatcgcggctacccgccagcgtgtccgcggcgccgccgccagcatgggctgtgccccgagcatccacatttccgagcgcctggtggccgaggacgcgcctagccccgcggcacccgccgctgtcgtccggcgggccgcgcctcccgcaggcccagaagacggccgccttgccccggacccgcggcgccggcctcttggagtcggagcttcgcgacggcagcggcaagaaggtagcagtagctgatgtgcagtttggccccatgagatttcatcaagatcaacttcaggtacttttagtgtttaccaaagaagataaccaatgtaatggattctgcagggcatgtgaaaaagcagggtttaagtgtacagttaccaaggaggctcaggctgtccttgcctgtttcctggacaaacatcatgacattatcatcatagaccacagaaatcctcgacagctggatgcagaggcactgtgcaggtctatcagatcatcaaaactctcagaaaacacagttattgttggtgtagtacgcagggtggatagagaagagttgtccgtaatgcctttcatttctgctggatttacaaggaggtatgtagaaaaccccaacatcatggcctgctacaatgaactgctccagctggagtttggagaggtgcgatcacaactgaaactcagggcttgtaactcagtattcactgcattagaaaacagtgaagatgcaattgaaattacaagcgaagaccgttttatacagtatgcaaatcctgcatttgaaacaacaatgggctatcagtcaggtgaattaatagggaaggagttaggagaagtgcctataaatgaaaaaaaggctgacttgctcgatactataaattcatgcatcaggataggcaaggagtggcaaggaatttactatgccaaaaagaaaaacggagataatatacaacaaaatgtgaagataatacctgtcattggacagggaggaaaaattagacactatgtgtccattatcagagtgtgcaatggcaacaataaggctgagaaaatatccgaatgtgttcagtctgacactcatacagataatcagacaggcaaacataaagacaggagaaaaggctcactagacgtcaaagctgttgcctcccgtgcaactgaagtttccagccagagacgacactcttccatggcccggatacattccatgacaattgaggcgcccatcaccaaggtaatcaatattatcaatgctgcccaggaaagtagtcccatgcctgtgacagaagccctagaccgtgtgctggaaattctaagaaccactgagttatattcaccacagtttggtgctaaagatgatgatccccatgccaatgaccttgttgggggcttaatgtctgatggtttgcgaagactatcagggaatgaatatgttctttcaacaaaaaacactcaaatggtttcaagcaatataatcactcccatctcccttgatgatgtcccaccacggatagctcgggccatggaaaatgaggaatactgggactttgatatttttgaactggaggctgccacccacaataggcctttgatttatcttggtctcaaaatgtttgctcgctttggaatctgtgaattcttacactgttccgagtcaacgctaagatcatggttacaaattatcgaagccaattatcattcctccaatccctaccacaattctacacattctgctgatgtgcttcatgccactgcctattttctctccaaggagaggataaaggaaactttagatccaattgatgaggtcgctgcactcatcgcagccaccattcatgatgtggatcaccctgggagaaccaactccttcctgtgtaatgctggaagtgagctggccattttgtacaatgacactgctgtgctggagagccaccatgcggccttggccttccagctgaccactggagatgataaatgcaatatatttaaaaacatggagaggaatgattatcggacactgcgccaggggattatcgacatggtcttagccacagaaatgacaaagcactttgagcatgtcaacaaatttgtcaacagcatcaacaaacccttggcaacactagaagaaaatggggaaactgataaaaaccaggaagtgataaacactatgcttaggactccagagaaccggaccctaatcaaacgaatgctgattaaatgtgctgatgtgtccaatccctgccgacccctgcagtactgcatcgagtgggctgcacgcatttcggaagaatatttttctcagactgatgaagagaagcagcagggcttacctgtggtgatgccagtgtttgacagaaatacctgcagcatccccaaatcccaaatctctttcattgattacttcatcacagacatgtttgatgcttgggatgcctttgtagacctgcctgatttaatgcagcatcttgacaacaactttaaatactggaaaggactggacgaaatgaagctgcggaacctccgaccacctcctgaatagtgggagacaccacccagagccctgaagctttgttccttcggtcatttggaattcctgagggcagccagagctccttggtcctttcagtactaggcagaacagcccccgatctgcatagcctgtgaaagcccacggggacatcagtaaccttctgcagccaccatccaatgccattactgtcaagtgagacttggccactgtagcctgggcctgctgcaggagctcttcagaaaggcacatgaggaccacggtttgcctcagtttctggtaaaacacaaggtctggagtgcccctgcaaagggtattgatggacttcctgccagtgacagagcatgtctattgcaaacaattctctcagttacgttcagcacttaagaacggctaatggcaataggatctttagcaactttttcacatcatagaaggtgcaatcgctcacttgggaacactactgagagtgacttctcttttaaaattgagtagcagatgaaaaattaaaatttgaacttgattattaatatcaattaaaatgttttatttattttattaaaagctcaatattttctatgaattcaaaaatacttcagagccaaagccaacttcaaataccgtgaccaaatttacatgattcatattcattatgcattacttggtatacagacttattttcataatgcaaattaataaaatgacacttttactgcactatagaaatattcatgtatgttaaacttttctgattgaggctaactggaaaaagctggggtcgtattctaagtgctaaagaaggctgcttctactgtatagaacccagggctctgaaacagctctagccgcctaatgcacttcacaggtaactccccaaggtaaaactagactctcttgttggttcgcaaagaaaagttaggacttaacacttttttctaaaattttataattcaatttccaaaagtctactctattttatactgtttctacaaaatattccttataaaaacaaagaacaaaaattgaatatttaatgaattgacattttataaccaacctgtttttatctacggtgggaatctttgatgccagaaatttataaagaggttctgtatcttcacaccttgaataagcataataccataaaaaatgacacttgacatgtcaatgtatttgtcatttcattttaaactcgtatttgtggtttttttcccagataaaaatgaaattaaaccatttctttttaagaaatcatgtttt

SEQ ID NO: 119 - DNA, 1678 bp, Homo sapiens
  misc_feature: Incyte ID No: 350895.1
tccgttgctgtcggcgcgcggcggcccgggcgggggaagctggcgggctgaggcgccccgctcttctcctctgccccgggcccgcgaggccacgcgtcgccgcacgagagatgatgcaggacgtgtccagctcgccagtctcgccggccgacgacagcctgagcaacagcgaggaagagccagaccggcagcagccgccgagcgcgaagcgcggggcacgcaagcggcgcagcagcaggcgcagcgcgggcggcggcgcggggcccggcggagccgcgggtggggccgtcggaggcggcgacgagccgggcagcccggcccagggcaagcgcggcaagaagtctgcgggctgtggcggcggcggcggcgcgggcggcggcggcggcggcggcggcggcagcagcagcggcggcgggagtccgcagtcttacgaggagctgcagacgcagcgggtcatggccaacgtgcgggagcgccagcgcacccagtcgctgaacgaggcgttcgccgcgctgcggaagatcatccccacgctgccctcggacaagctgagcaagattcagaccctcaagctggcggccaggtacatcgacttcctctaccaggtcctccagagcgacgagctggactccaagatggcaagctgcagctatgtggctcacgagcggctcagctacgccttctcggtctggaggatggagggggcctggtccatgtccgcgtcccactagcaggcggagccccccaccccctcagcagggccggagacctagatgtcattgtttccagagaaggagaaaatggacagtctagagactctggagctggataactaaaaataaaaatatatgccaaagattttcttggaaattagaagagcaaaatccaaattcaaagaaacagggcgtggggcgcacttttaaaagagaaagcgagacaggcccgtggacagtgattcccagacgggcagcggcaccatcctcacacctctgcattctgatagaagtctgaacagttgtttgtgtttttttttttttttttttttgacgaagaatgtttttatttttatttttttcatgcatgcattctcaagaggtcgtgccaatcagccactgaaaggaaaggcatcactatggactttctctattttaaaatggtaacaatcagaggaactataagaacacctttagaaataaaaatactgggatcaaactggcctgcaaaaccatagtcagttaattctttttttcatccttcctctgaggggaaaaacaaaaaaaaacttaaaatacaaaaaacaacattctatttatttattgaggacccatggtaaaatgcaaatagatccggtgtctaaatgcattcatatttttatgattgttttgtaaatatctttgtatatttttctgcaataaataaatataaaaaatttagagaaccttagagtttggtctatatttttaaaactaaaaattaagttggtggtaaatacctgcttgtttaattctagaggcacccaggagggagggggcactaatataaacaaagcaatgaaaaactcaaataaagcagctactgacaggcacaagcatgttattttaaaagacagctttattattattccagtttggtatttagagggcttagttgcatctcttcatctcttactctctcctgc

SEQ ID NO: 120 - DNA, 5673 bp, Homo sapiens
  misc_feature: Incyte ID No: 434265.5
gcggacctgagccccgcgcctgggatgccggggatgcgcgtcccccggccctgcggctgctccgggctgggcgcggggcgatggacctgagcatgaagaagttcgccgtgcgcaggttcttctctgtgtacctgcgcaggaagtcgcgctccaagagctccagcctgagccggctcgaggaagaaggtgtcgtgaaggagatagacatcagccatcatgtgaaggagggctttgagaaggcagatccttcccagtttgagctgctgaaggttttaggacaaggatcctatggaaaggtgttcctggtgaggaaggtgaaggggtccgacgctgggcagctctacgccatgaaggtccttaagaaagccaccctaaaagttcgggaccgagtgagatcgaagatggagagagacatcttggcagaagtgaatcaccccttcattgtgaagcttcattatgcctttcagacggaaggaaagctctacctgatcctggacttcctgcggggaggggacctcttcacccggctctccaaagaggtcatgttcacggaggaggatgtcaagttctacctggctgagctggccttggctttagaccatctccacagcctggggatcatctacagagatctgaagcctgagaacatcctcctggatgaagaggggcacattaagatcacagatttcggcctgagtaaggaggccattgaccacgacaagagagcgtactccttctgcgggacgatcgagtacatggcgcccgaggtggtgaaccggcgaggacacacgcagagtgccgactggtggtccttcggcgtgctcatgtttgagatgctcacggggtccctgccgttccaggggaaggacaggaaggagaccatggctctcatcctcaaagccaagctggggatgccgcagttcctcagtggggaggcacagagtttgctgcgagctctcttcaaacggaacccctgcaaccggctgggtgctggcattgacggagtggaggaaattaagcgccatcccttctttgtgaccatagactggaacacgctgtaccggaaggagatcaagccaccgttcaaaccagcagtgggcaggcctgaggacaccttccactttgaccccgagttcacagcgcggacgcccacagactctcctggcgtccccccgagtgcaaacgctcatcacctgtttagaggattcagctttgtggcctcaagcctgatccaggagccctcacagcaagatctgcacaaagtcccagttcacccaatcgtgcagcagttacacgggaacaacatccacttcaccgatggctacgagatcaaggaggacatcggggtgggctcctactcagtgtgcaagcgatgtgtgcataaagccacggacaccgagtatgccgtgaagatcattgataagagcaagagagacccctcggaagagattgagatcctcctgcggtacggccagcacccgaacatcatcaccctcaaggatgtctatgatgatggcaagtttgtgtacctggtaatggagctgatgcgtggtggggagctcctggaccgcatcctccggcagagatacttctcggagcgcgaagccagtgacgtcctgtgcaccatcaccaagaccatggactacctccattcccagggggttgttcatcgagacctgaagccgagtaacatcctgtacagggatgagtcggggagcccagaatccatccgagtctgcgacttcggctttgccaagcagctgcgcgcggggaacgggctgctcatgacaccctgctacacggccaatttcgtggccccggaggtcctgaagcgtcaaggctatgatgcggcgtgtgacatctggagtttggggatcctgttgtacaccatgctggcaggatttaccccttttgcaaatgggccagacgatacccctgaggagattctggcgcggatcggcagtgggaagtatgccctttctgggggaaactgggactcgatatctgacgcagctaaagacgtcgtgtccaagatgctccacgtggaccctcatcagcgcctgacggcgatgcaagtgctcaaacacccgtgggtggtcaacagagagtacctgtccccaaaccagctcagccgacaggacgtgcacctggtgaagggcgcgatggccgccacctactttgctctaaacagaacacctcaggccccgcggctggagcccgtgctgtcatccaacctggctcagcgcagaggcatgaagagactcacgtccacgcggttgtagcgggtgggaccctggccccagcgtcccctgccagcatcctcgtgggctcacagaccccggcctcggagcccgtctggcacccagagtgaccacaagtccagcagggaggcggcgcccgccctcgccgtgtccgtgttttctttttcagccccggagagggtcctgacctgggggcttctccaagcctcactgcgccagcctccccgcccgctctcttttctcccaagcaaaaccaaatgcgccccttcacctcgcgtgcccgtgcgaggccgggggcttctttcagagcccgcgggtcctctcatacatggcttctgtttctgccgagagatctgttttccaattatgaagccggtcggtttggtcagactcccgacacccacgtcccaggtacccggtgggaaagtggcagtgcgagggcgcagccattggtggttgcagggccccagagggctggggtgacctggcatcccggggctccccacgggctggatgacggggttggcactgtggcgtccaggaggagatgcctggttctgcccaaaataatccaaagagccgtttcctcctcgcccttcagtttttgcctgaggtgctgggtagcccatcctttcctctgtcccagattcaaatgaggagtaagagcccagacgagaggaaggcaggctggatctttgccttgagagctccgtgtcaccaggatggaagggggtgcctctcggaggagcctgtgtccacctccagtctcggctttccccgggggggccaagcgcactggggctgccgtctgtccccagctcccgtgggccacacagctatctggaggctttgcagggagtcgtgggttctcgcacctgctcagccctgtgtcggcttcctgtgtgctcacctaaagctgtggttttgctgtgttcacttcgatttttctggtctgtggagaaactgtgaattggagaaatggagctctgtggcttcccacccaaaccttctcagtccagctggaggctggagggagacacaggccccacccagcagactgaggggcagaggcacaggtgggagggcagcggagatcagcgtggacaggagcgatgcactttgtagatgctgtggctttgtgttgcgttttgtgtctctgttgcacagatctgttttttcacactgatccgtattcccctgggtgtgcacacagggcgggtgtggggcatttaggccatgctgtgctctacttcattgagtaaaatcgagtgagaggttccgggcagcaggatcgacgcccagtccagccggcagagggaacacacgggtccttcattgtcctgtaagggtgttgaagatgctccctggcggcccccaagcagactagatgggaggaggcgccgctcagcccctcaccctgcatcactgaagagcggcgcctctgcagcaagcagggcttcaggaggtgcccgctggccacagccaggttttccctaagaagatgttattttgttgggttttgttccccctccatctcgattctcgtacccaactaaaaaaaaaaaaataaagaaaaaatgtgctgcgttctgaaaaataactccttagcttggtctgattgttttcagaccttaaaatataaacttgtttcacaagctttaatccatgtggatttttttttcttagagaaccacaaaacataaaaggagcaagtcggactgaatacctgtttccatagtgcccacagggtattcctcacattttctccatagaagatgctttttcccaaggctagaacgacttccaccatgatgaatttgctttttaggtcttaattatttcacttctttttagaaacttaggaagaagtggataatcctgaggtcacacaatctgtcctcccagaaatgaacaaaagtcatcaccttttctgcttgctacacaggcaacgattcccccatcagctgcccggaccctttggcctggcttggtgtgcaggcctgtctgtttgcttaaagtcagtgggttctggtgcagggagtgagaagtgggggaagtgaaagggaaagcatccgtgagaaagcggccacggttttccctccttgtgtgcccatggggcaccagctcatggtctttttcagtcatcccagtttgtacagacttagcttctgaactctaagaatgccaaagggaccgacgagactccccatcacagcgagctctgtccttacatgtatttgatgtgcatcagcggaggagaacactggcttggccctgctccgctgagtgtctgtgaaatacctctactttccctcccatatccagaacaaaatgatacttgacatccttccacaaaagtcagcctaaagaagttatggtatcatatgttaaactaagctttcaaaaaccttagtgaaatagcaagtgactgctttcaagcagcagtcgacatgtaaatgaaggtgttcttagaattcgcattttgccagctcagcgcacctccacaacgaatgaaatgctccgtatgatttgcacaaatgacatagacctccccaaaagttaactggctctccttcctcacacagttcatcataacccaaccccccacccccgggtcatgaaaatcacagaacttataaacacattgaaccctagatctcaggcttcctgacctaccgccagtggccccttgctggccaccctatagggtcctccttccctggcagccccccatgtgggagaaatacctgattctcccaatctgcagtgggagagctttgctgaattccatcccaaagtcaaacatgggcaagaggtgaggatttcacttttaccctcaagtccgatttgtctgtgattttaaactaactgtgtatgtattgatgtttggaagattgtttgaattttaaagtgataatagtacttaatgttatccagtattgttcattaaatggtgttatcctaaagctgcacttgggatttttacctaacgctttactgattctctcaagcacatggcaaagtttgatttgcactccgttcatttctgacacgttttgctgcctcctacctttctaagcgtcatgcaaattcgagaatggagaaggacgctgccggtccctgagcggtgtggagagggcggaaggtggactccagcgcagcttgaggggctgaggacggaggctgcagcatctgtgtcgttctactgagcacgcttctctgcctcgctcctgactcagcactttgttcactggctcagcagttatgtttacacatcatttttatgttcctgctttgtaattcatgtttgagatgggtggccactgtacagatatttattacgctttccagactttctgaatagatttttttgaataaacatggttttatgaagtgtaatctttttctagcc

SEQ ID NO: 121 - DNA, 8044 bp, Homo sapiens
  misc_feature: Incyte ID No: 427813.14
cggctcgagccggctgtgctgcacagggggaggagagggaaccccaggcgcgagcgggaagaggggacctgcagccacaacttctctggtcctctgcatcccttctgtccctccacccgtccccttccccaccctctggcccccaccttcttggaggcgacaacccccgggaggcattagaagggatttttcccgcaggttgcgaagggaagcaaacttggtggcaacttgcctcccggtgcgggcgtctctcccccaccgtctcaacatgcttaggggtccggggcccgggctgctgctgctggccgtcctgtgcctggggacagcggtgccctccacgggagcctcgaagagcaagaggcaggctcagcaaatggttcagccccagtccccggtggctgtcagtcaaagcaagcccggttgttatgacaatggaaaacactatcagataaatcaacagtgggagcggacctacctaggcaatgcgttggtttgtacttgttatggaggaagccgaggttttaactgcgagagtaaacctgaagctgaagagacttgctttgacaagtacactgggaacacttaccgagtgggtgacacttatgagcgtcctaaagactccatgatctgggactgtacctgcattggggctgggcgagggagaataagctgtaccatcgcaaaccgctgccatgaagggggtcagtcctacaagattggtgacacctggaggagaccacatgagactggtggttacatgttagagtgtgtgtgtcttggtaatggaaaaggagaatggacctgcaagcccatagctgagaagtgttttgatcatgctgctgggacttcctatgtggtcggagaaacgtgggagaagccctaccaaggctggatgatggtagattgtacttgcctgggagaaggcagcggacgcatcacttgcacttctagaaatagatgcaacgatcaggacacaaggacatcctatagaattggagacacctggagcaagaaggataatcgaggaaacctgctccagtgcatctgcacaggcaacggccgaggagagtggaagtgtgagaggcacacctctgtgcagaccacatcgagcggatctggccccttcaccgatgttcgtgcagctgtttaccaaccgcagcctcacccccagcctcctccctatggccactgtgtcacagacagtggtgtggtctactctgtggggatgcagtggctgaagacacaaggaaataagcaaatgctttgcacgtgcctgggcaacggagtcagctgccaagagacagctgtaacccagacttacggtggcaactcaaatggagagccatgtgtcttaccattcacctacaatggcaggacgttctactcctgcaccacagaagggcgacaggacggacatctttggtgcagcacaacttcgaattatgagcaggaccagaaatactctttctgcacagaccacactgttttggttcagactcgaggaggaaattccaatggtgccttgtgccacttccccttcctatacaacaaccacaattacactgattgcacttctgagggcagaagagacaacatgaagtggtgtgggaccacacagaactatgatgccgaccagaagtttgggttctgccccatggctgcccacgaggaaatctgcacaaccaatgaaggggtcatgtaccgcattggagatcagtgggataagcagcatgacatgggtcacatgatgaggtgcacgtgtgttgggaatggtcgtggggaatggacatgcattgcctactcgcagcttcgagatcagtgcattgttgatgacatcacttacaatgtgaacgacacattccacaagcgtcatgaagaggggcacatgctgaactgtacatgcttcggtcagggtcggggcaggtggaagtgtgatcccgtcgaccaatgccaggattcagagactgggacgttttatcaaattggagattcatgggagaagtatgtgcatggtgtcagataccagtgctactgctatggccgtggcattggggagtggcattgccaacctttacagacctatccaagctcaagtggtcctgtcgaagtatttatcactgagactccgagtcagcccaactcccaccccatccagtggaatgcaccacagccatctcacatttccaagtacattctcaggtggagacctaaaaattctgtaggccgttggaaggaagctaccataccaggccacttaaactcctacaccatcaaaggcctgaagcctggtgtggtatacgagggccagctcatcagcatccagcagtacggccaccaagaagtgactcgctttgacttcaccaccaccagcaccagcacacctgtgaccagcaacaccgtgacaggagagacgactcccttttctcctcttgtggccacttctgaatctgtgaccgaaatcacagccagtagctttgtggtctcctgggtctcagcttccgacaccgtgtcgggattccgggtggaatatgagctgagtgaggagggagatgagccacagtacctggatcttccaagcacagccacttctgtgaacatccctgacctgcttcctggccgaaaatacattgtaaatgtctatcagatatctgaggatggggagcagagtttgatcctgtctacttcacaaacaacagcgcctgatgcccctcctgacccgactgtggaccaagttgatgacacctcaattgttgttcgctggagcagaccccaggctcccatcacagggtacagaatagtctattcgccatcagtagaaggtagcagcacagaactcaaccttcctgaaactgcaaactccgtcaccctcagtgacttgcaacctggtgttcagtataacatcactatctatgctgtggaagaaaatcaagaaagtacacctgttgtcattcaacaagaaaccactggcaccccacgctcagatacagtgccctctcccagggacctgcagtttgtggaagtgacagacgtgaaggtcaccatcatgtggacaccgcctgagagtgcagtgaccggctaccgtgtggatgtgatccccgtcaacctgcctggcgagcacgggcagaggctgcccatcagcaggaacacctttgcagaagtcaccgggctgtcccctggggtcacctattacttcaaagtctttgcagtgagccatgggagggagagcaagcctctgactgctcaacagacaaccaaactggatgctcccactaacctccagtttgtcaatgaaactgattctactgtcctggtgagatggactccacctcgggcccagataacaggataccgactgaccgtgggccttacccgaagaggccagcccaggcagtacaatgtgggtccctctgtctccaagtaccccctgaggaatctgcagcctgcatctgagtacaccgtatccctcgtggccataaagggcaaccaagagagccccaaagccactggagtctttaccacactgcagcctgggagctctattccaccttacaacaccgaggtgactgagaccaccattgtgatcacatggacgcctgctccaagaattggttttaagctgggtgtacgaccaagccagggaggagaggcaccacgagaagtgacttcagactcaggaagcatcgttgtgtccggcttgactccaggagtagaatacgtctacaccatccaagtcctgagagatggacaggaaagagatgcgccaattgtaaacaaagtggtgacaccattgtctccaccaacaaacttgcatctggaggcaaaccctgacactggagtgctcacagtctcctgggagaggagcaccaccccagacattactggttatagaattaccacaacccctacaaacggccagcagggaaattctttggaagaagtggtccatgctgatcagagctcctgcacttttgataacctgagtcccggcctggagtacaatgtcagtgtttacactgtcaaggatgacaaggaaagtgtccctatctctgataccatcatcccagctgttcctcctcccactgacctgcgattcaccaacattggtccagacaccatgcgtgtcacctgggctccacccccatccattgatttaaccaacttcctggtgcgttactcacctgtgaaaaatgaggaagatgttgcagagttgtcaatttctccttcagacaatgcagtggtcttaacaaatctcctgcctggtacagaatatgtagtgagtgtctccagtgtctacgaacaacatgagagcacacctcttagaggaagacagaaaacaggtcttgattccccaactggcattgacttttctgatattactgccaactcttttactgtgcactggattgctcctcgagccaccatcactggctacaggatccgccatcatcccgagcacttcagtgggagacctcgagaagatcgggtgccccactctcggaattccatcaccctcaccaacctcactccaggcacagagtatgtggtcagcatcgttgctcttaatggcagagaggaaagtcccttattgattggccaacaatcaacagtttctgatgttccgagggacctggaagttgttgctgcgacccccaccagcctactgatcagctgggatgctcctgctgtcacagtgagatattacaggatcacttacggagaaacaggaggaaatagccctgtccaggagttcactgtgcctgggagcaagtctacagctaccatcagcggccttaaacctggagttgattataccatcactgtgtatgctgtcactggccgtggagacagccccgcaagcagcaagccaatttccattaattaccgaacagaaattgacaaaccatcccagatgcaagtgaccgatgttcaggacaacagcattagtgtcaagtggctgccttcaagttcccctgttactggttacagagtaaccaccactcccaaaaatggaccaggaccaacaaaaactaaaactgcaggtccagatcaaacagaaatgactattgaaggcttgcagcccacagtggagtatgtggttagtgtctatgctcagaatccaagcggagagagtcagcctctggttcagactgcagtaaccaacattgatcgccctaaaggactggcattcactgatgtggatgtcgattccatcaaaattgcttgggaaagcccacaggggcaagtttccaggtacagggtgacctactcgagccctgaggatggaatccatgagctattccctgcacctgatggtgaagaagacactgcagagctgcaaggcctcagaccgggttctgagtacacagtcagtgtggttgccttgcacgatgatatggagagccagcccctgattggaacccagtccacagctattcctgcaccaactgacctgaagttcactcaggtcacacccacaagcctgagcgcccagtggacaccacccaatgttcagctcactggatatcgagtgcgggtgacccccaaggagaagaccggaccaatgaaagaaatcaaccttgctcctgacagctcatccgtggttgtatcaggacttatggtggccaccaaatatgaagtgagtgtctatgctcttaaggacactttgacaagcagaccagctcagggtgttgtcaccactctggagaatgtcagcccaccaagaagggctcgtgtgacagatgctactgagaccaccatcaccattagctggagaaccaagactgagacgatcactggcttccaagttgatgccgttccagccaatggccagactccaatccagagaaccatcaagccagatgtcagaagctacaccatcacaggtttacaaccaggcactgactacaagatctacctgtacaccttgaatgacaatgctcggagctcccctgtggtcatcgacgcctccactgccattgatgcaccatccaacctgcgtttcctggccaccacacccaattccttgctggtatcatggcagccgccacgtgccaggattaccggctacatcatcaagtatgagaagcctgggtctcctcccagagaagtggtccctcggccccgccctggtgtcacagaggctactattactggcctggaaccgggaaccgaatatacaatttatgtcattgccctgaagaataatcagaagagcgagcccctgattggaaggaaaaagacagacgagcttccccaactggtaacccttccacaccccaatcttcatggaccagagatcttggatgttccttccacagttcaaaagacccctttcgtcacccaccctgggtatgacactggaaatggtattcagcttcctggcacttctggtcagcaacccagtgttgggcaacaaatgatctttgaggaacatggttttaggcggaccacaccgcccacaacggccacccccataaggcataggccaagaccatacccgccgaatgtaggacaagaagctctctctcagacaaccatctcatgggccccattccaggacacttctgagtacatcatttcatgtcatcctgttggcactgatgaagaacccttacagttcagggttcctggaacttctaccagtgccactctgacaggcctcaccagaggtgccacctacaacatcatagtggaggcactgaaagaccagcagaggcataaggttcgggaagaggttgttaccgtgggcaactctgtcaacgaaggcttgaaccaacctacggatgactcgtgctttgacccctacacagtttcccattatgccgttggagatgagtgggaacgaatgtctgaatcaggctttaaactgttgtgccagtgcttaggctttggaagtggtcatttcagatgtgattcatctagatggtgccatgacaatggtgtgaactacaagattggagagaagtgggaccgtcagggagaaaatggccagatgatgagctgcacatgtcttgggaacggaaaaggagaattcaagtgtgaccctcatgaggcaacgtgttacgatgatgggaagacataccacgtaggagaacagtggcagaaggaatatctcggtgccatttgctcctgcacatgctttggaggccagcggggctggcgctgtgacaactgccgcagacctgggggtgaacccagtcccgaaggcactactggccagtcctacaaccagtattctcagagataccatcagagaacaaacactaatgttaattgcccaattgagtgcttcatgcctttagatgtacaggctgacagagaagattcccgagagtaaatcatctttccaatccagaggaacaagcatgtctctctgccaagatccatctaaactggagtgatgttagcagacccagcttagagttcttctttctttcttaagccctttgctctggaggaagttctccagcttcagctcaactcacagcttctccaagcatcaccctgggagtttcctgagggttttctcataaatgagggctgcacattgcctgttctgcttcgaagtattcaataccgctcagtattttaaatgaagtgattctaagatttggtttgggatcaataggaaagcatatgcagccaaccaagatgcaaatgttttgaaatgatatgaccaaaattttaagtaggaaagtcacccaaacacttctgctttcacttaagtgtctggcccgcaatactgtaggaacaagcatgatcttgttactgtgatattttaaatatccacagtactcactttttccaaatgatcctagtaattgcctagaaatatctttctcttacctgttatttatcaatttttcccagtatttttatacggaaaaaattgtattgaaaacacttagtatgcagttgataagaggaatttggtataattatggtgggtgattattttttatactgtatgtgccaaagctttactactgtggaaagacaactgttttaataaaagatttacattccacaaaaaaaaaaaaaaggg

SEQ ID NO: 122 - DNA, 5286 bp, Homo sapiens
  misc_feature: Incyte ID No: 014704.3
  unsure 4789-4822: a, t, c, g, or other
taagcttgcgccgaccaatttttttttttttttttttttttttttttggtctgggcttccgaatatgttttatgacggttgattttacaccaggaggtttgtctccgaggaagacccagggaactggatatctagcgagaacttcctccggattccccggcgcctcgggaaaatgggagctgctgcaaagttggcgtttgccgtctttcttatctcctgttcttcaggtgctatacttggtagatcagaaactcaggagtgtcttttctttaatgctaattgggaaaaagacagaaccaatcaaactggtgttgaaccgtgttatggtgacaaagataaacggcggcattgttttgcctacctggaagaatatttctggttccattgaaatagtgaaacaaggttgttggctggatgatatcaactgctatgacaggactgattgtgtagaaaaaaaagacagccctgaagtatatttttgttgctgtgagggcaatatgtgtaatgaaaagttttcttattttccggagatggaagtcacacagcccacttcaaatccagttacacctaagccaccctattacaacatcctgctctattccttggtgccacttatgttaattgcggggattgtcatttgtgcattttgggtgtacaggcatcacaagatggcctaccctcctgtacttgttccaactcaagacccaggaccacccccaccttctccattactaggtttgaaaccactgcagttattagaagtgaaagcaaggggaagatttggttgtgtctggaaagcccagttgcttaacgaatatgtggctgtcaaaatatttccaatacaggacaaacagtcatggcaaaatgaatacgaagtctacagtttgcctggaatgaagcatgagaacatattacagttcattggtgcagaaaaacgaggcaccagtgttgatgtggatctttggctgatcacagcatttcatgaaaagggttcactatcagactttcttaaggctaatgtggtctcttggaatgaactgtgtcatattgcagaaaccatggctagaggattggcatatttacatgaggatatacctggcctaaaagatggccacaaacctgccatatctcacagggacatcaaaagtaaaaatgtgctgttgaaaaacaacctgacagcttgcattgctgactttgggttggccttaaaatttgaggctggcaagtctgcaggcgatacccatggacaggttggtacccggaggtacatggctccagaggtattagagggtgctataaacttccaaagggatgcatttttgaggatagatatgtatgccatgggattagtcctatgggaactggcttctcgctgtactgctgcagatggacctgtagatgaatacatgttgccatttgaggaggaaattggccagcatccatctcttgaagacatgcaggaagttgttgtgcataaaaaaaagaggcctgttttaagagattattggcagaaacatgctggaatggcaatgctctgtgaaaccattgaagaatgttgggatcacgacgcagaagccaggttatcagctggatgtgtaggtgaaagaattacccagatgcagagactaacaaatattattaccacagaggacattgtaacagtggtcacaatggtgacaaatgttgactttcctcccaaagaatctagtctatgatggttgcgccatctgtgcacactaagaaatgggactctgaactggagctgctaagctaaagaaactgcttacagtttattttctgtgtaaaatgagtaggatgtctcttggaaatgttaagaaagaagaccctttgttgaaaaatgttgctctgggagacttactgcattgccgacagcacagatgtgaaggacatgagactaagagaaaccttgcaaactctataaagaaacttttgaaaaagtgtacatgaagaatgtagccctctccaaatcaaggatcttttggacctggctaatggagtgtttgaaaactgacatcagatttcttaatgtctgtcagaagacactaattccttaaatgaactactgctattttttttaaatcaaaaacttttcatttcagattttaaaaagggtaacttgtttttattgcatttgctgttgtttctataaatgactattgtaatgccaatatgacacagcttgtgaatgtttagtgtgctgctgttctgtgtacataaagtcatcaaagtggggtacagtaaagaggcttccaagcattactttaacctccctcaacaaggtatacctcagttccacggttgctaaattataaaattgaaaacactaacaaaatttgaataataaatcgatccatgttttgtaacaaattcactgtgttatttaaggaaaaaaaggtaagctatgcttagtgccaacaataagtggccattcgtaaagcagtgttttagcatttcttgtgctggcttgtaatgtagggaaaaaaagtgctgttttttgaaaagatggtgtcatttcccccttcttcccatgttttaaagccccatcttatatccagttcccaaaatttgcatacttacctaagtattttttttaggtgtgctgtgtttggggaatatttgaaaatttaaagcatgatttaaaattttttaaagtgagctgtgacactggaaagctcttcattttatcttttaaaatagagttttttctatttatatatgtaaaattgtagtgtatttcttttcaccaaacagtgtgtgggacattctttatcactgttttaggatcacctcaggaagtgtcgttacccagaattccccactgtctgctatgagacttgtaactttatcactatacttctgcttggtgccatcttgtcagagtaatatttgatgtctgtgatatgtaaagaattatcctaggataaagatattaaactttaagcagatttcagatgttactgctttaaaacaaatcagggataacaaattaaacgtataacttaaaatatgcaatgacatttagaggtaaccaatgttgatataggtagcatagcctagcctcctccccaaaattgcttttacaactaacactgatactaatttaggatagttcatgccttatccttgctaagaaaatggaattgatggtaggcaggtgctaaagtgcttttcaaaacaatattacgttagaatacaattggattcttcctcaaatttatacaggccaaaaagtaaaacattaattttctgaatttccagattaccaatcaattaatcaacaaatagccagtattatgctgtgtatttctgtcaggtcattttaaaatccatgttaattttataaaagaattttttacatgtcactgtcaggagctcactgtgaatgtgttgtcttcaaatggttatttaaccacacagtacactacattttacatatatgtacgtaatctctgggaatagtaaattaattatgttatttataaacaatacataggtcaacagactttaagcagggaggaaaagaagagtaatagcgtctgtgtgctgcagaccattcagaactgtcacgtgtgtccccatggtctcattcattgtattcctagcaattcccttttcaatgttgagttcacctctttatttcacaaagtacttggtctctcaatttcttgatctggttttgcttccatttaaaaactaatcaagaagggaaaatattgagaatgtgcatacaagaaaatcattaatttcctgaagatgaatttctacctgttgtgaacatttaactttctttttaaaagttaaacaaaaataaacaagggatattatgatgaatgtttggcttatgtgagtactagagataaaatttttaaacccagttattcacaatataaaatgttttcaagttagaaaaattttttagaaatcctgggtattgtatttaactgtagctaaccaattttaaaacttgtattcttttgagaactattattaatagaaaaactttttataagcagtaaaataagaatgttccagtgactacctgtccttatacctagtcttgttaaaactttcttttgcagggtatttagtgtttggtttacagtcagtgcagagtgggcaagttaacagaaagtttgagctagagatactggaaaaaaaaaagatcaaagaatgagaaaaatggtgatccattttggggcaaactgagaccccccaaataactctttcctcatgtgtatggtgctcctcatgactcgtcttgtattttgcctttctgatacccatcagaactgctgctgctctaacttatactctttaccttgcccagatctccgcgtaaggaatgctttatgatcaacttgccataggactgatggattaaccagtgttcggctttatttgaagtctatgccctgcacagctcttgtatgtattttagatgctagaagtttttttagcatgtgatgtgtgattcttgtttgaattctaggtaccttgtgaattccagaaaaagagactgtgcttcacgattgttagtcccatgaacttgcactatctatctttcatggtgatgttttgaaaatacaatcaggaaaaaacccaacacctttggaatttaaaatagaatcatatcatgaaatttaaaaagaatctcttctgttgcatttcctcacccctaagtaacagctacatttaagtaaaatgcaggtggtaggggaaaaaaaaccatggcgagatggtggtttagtggaataaactgattactggnnnnnnnnnnnnnnnnnnnnnnnnnnnnnnnnnngcttcatcacagatactttccagtttctcttttatacttttttgaaagattactttttaggaacatttggtatgatatgcataaaattatttatccatttatgggcaaaatgatacaagtagcatcttgattgaacatcatttacctcagatattcaaccagcagtacgttttttatgcagtctcaacccatatcccatttgttacctctcagaatattggtaagcagttattttcgctttactctgtatttcttgtgttttgggcacaggttattgtactactgtcaaatcgtacttgctattttttctgcaagtatttaacagaaagcttaaaatccccataaaaccccaccttggataagtgattgttaaatattgtacaaataaaatgtatgctatccccattccatccccaagttaaataaaaaaatgaatacggtatgatttgcatatgcagtttttc

SEQ ID NO: 123 - DNA, 3704 bp, Homo sapiens
  misc_feature: Incyte ID No: 344240.2
  unsure 3522, 3634-3635, 3699: a, t, c, g, or other
cggctcgaggagaagtggataaatcagtgctgctttctttaggacgaaagaagtatggagcagtgggatcactttcacaatcaacaggaggacactgatagctgctccgaatctgtgaaatttgatgctcgctcaatgacagctttgcttcctccgaatcctaaaaacagcccttcccttcaagagaaactgaagtccttcaaagctgcactgattgccctttacctcctcgtgtttgcagttctcatccctctcattggaatagtggcagctcaactcctgaagtgggaaacgaagaattgctcagttagttcaactaatgcaaatgatataactcaaagtctcacgggaaaaggaaatgacagcgaagaggaaatgagatttcaagaagtctttatggaacacatgagcaacatggagaagagaatccagcatattttagacatggaagccaacctcatggacacagagcatttccaaaatttcagcatgacaactgatcaaagatttaatgacattcttctgcagctaagtaccttgttttcctcagtccagggacatgggaatgcaatagatgaaatctccaagtccttaataagtttgaataccacattgcttgatttgcagctcaacatagaaaatctgaatggcaaaatccaagagaataccttcaaacaacaagaggaaatcagtaaattagaggagcgtgtttacaatgtatcagcagaaattatggctatgaaagaagaacaagtgcatttggaacaggaaataaaaggagaagtgaaagtactgaataacatcactaatgatctcagactgaaagattgggaacattctcagaccttgagaaatatcactttaattcaaggtcctcctggacccccgggtgaaaaaggagatcgaggtcccactggagaaagtggtccacgaggatttccaggtccaataggtcctccgggtcttaaaggtgatcggggagcaattggctttcctggaagtcgaggactcccaggatatgccggaaggccaggaaattctggaccaaaaggccagaaaggggaaaaggggagtggaaacacattaactccatttacgaaagttcgactggtcggtgggagcggccctcacgaggggagagtggagatactccacagcggccagtggggtacaatttgtgacgatcgctgggaagtgcgcgttggacaggtcgtctgtaggagcttgggatacccaggtgttcaagccgtgcacaaggcagctcactttggacaaggtactggtccaatatggctgaatgaagtgttttgttttgggagagaatcatctattgaagaatgtaaaattcggcaatgggggacaagagcctgttcacattctgaagatgctggagtcacttgcactttataatgcatcatattttcattcacaactatgaaatcgctgctcaaaaatgattttattaccttgttcctgtaaaatccatttaatcaatatttaagagattaagaatattgcccaaataatattttagattacaggattaatatattgaacaccttcatgcttactattttatgtctatatttaaatcattttaacttctataggtttttaaatggaattttctaatataatgacttatatgctgaattgaacattttgaagtttatagcttccagattacaaaggccaagggtaatagaaatgcataccagtaattggctccaattcataatatgttcaccaggagattacaattttttgctcttcttgtctttgtaatctatttagttgattttaattactttctgaataacggaagggatcagaagatatcttttgtgcctagattgcaaaatctccaatccacacatattgttttaaaataagaatgttatccaactattaagatatctcaatgtgcaataacttgtgtattagatatcaatgttaatgatatgtcttggccactatggaccagggagcttatttttcttgtcatgtactgacaactgtttaattgaatcatgaagtaaattgaaagcaggacatatgagaaaactgaccatcagtatatttgtccagataattggtggatcaaaaatgccacttaacaggaagtttagtttgttatgcactttaaatggaataattagcttgttacaattctaggacatggtgtttaaaatttaaatctgattaatccattttaacaaacaatgcaaacattttcagtgcagaaggaagagtggtttcaactgtttggagtcttttatgaagtcagtcaacatgtacaaccaaagggcgggggggggtggggggtgcgtctttagtcctaaagggacaataactctgagcatgccccaaaaaagtagcttagcaaccttttgttggtagtcaacccatccccagggccatagtgtagagtgtgaaaagctaccctgaaacccagtaatcctaccctgaaagtgactgcctgcagaaagaccagcagttgatattaaagcgcaaatgaattcaacctcagccctgaaaataacagaattctgaagtttcctatgactaattcacaaaaaaagtaattgtaaactagtactattatggaattactctactgttctttctttaatagtggcaaatgaaagcataagcttaagcattttttcatattctgaagtctcaccacacataataaccaagtggtagactcacagccgtccaacttaaaaaggcaaaaccttaccttggaattggaattactgtaaacagcctactgaaaatgcatttttatcatgtaacattcttctacttgtttaacattgctgattttctctggcagcataattttgtggttaagagaatgaattctgaatgtacactttctgtctcaaaccctggctgtaatttcagctagttaataattctttgtgttcagttccactatctaggtattttcttcaaaaggtaaatacaatggtttctgaaagaatcatttgcattatcagcctgtttgggatgtctgagatcagtgcctctgggttgttaatactgtattgctgtatggtatatgtatgctgatttactacttatgcgtaagtggtatgcatgggatgtctgaaatcagtgcctatgggttgtcaatagtattaactattagtgttaactgttagtattaactattagtattattaacactaataatagtactattactattactatttttattttaaaataaaatttacctttaaaataataatagtgctattgctagtactagtactattgctattactgggtactattactagtactagtactatgacactgttaatagtactattaacaacccataggcacttgggatgtctgagatcagtgcctatgggttgttagtactatattgctgtatggtatatgcatgctgatttaccacttatgcatagatatatctttaataagtaatctaaaaatcctttttgtatttgagagaatctactaagttcagtccagtcaagnaaagaacctaatagcaccaatacaaattgaggacttaatttactttggaatgttgaattgcatttgttccattaaaaaaaacagaaatttgcgatttggtttttttgaaaanntagctcagctgaccagaatgaatgtattctacttgttgagccatccagcatcacgttaaatgcnaaatg

SEQ ID NO: 124 - DNA, 5301 bp, Homo sapiens
  misc_feature: Incyte ID No: 239694.6
  unsure 1712-1853, 2182: a, t, c, g, or other
ggcggccccgccccgccccgcccggctgctccatggcgctgtgcggaggccgcgggctgcggggagtgccctgctctggcctcgcttgttgctcttcggggactccatcacccagttttccttccagcagggtggatggggagcatcgctggctgacaggctggtcagaaaatgtgatgttctgaatcgtggattttcaggttacaataccaggtgggccaaaattatccttccaagattaatcaggaaaggaaacagtttggacatcccagtagcagttacaattttctttggggccaatgacagtgcactaaaagatgagaatcccaagcagcacattcccctggaggagtacgctgcgaacctaaagagcatggtgcagtacctgaagtccgtggacatccctgagaatcgagtcattctcatcacgccgaccccactttgtgaaacagcctgggaagaacagtgcatcatacaaggttgcaaactaaatcgcctgaactctgttgttggtgaatatgccaatgcgtgtttacaagtggcccaagactgtgggactgacgtacttgacctgtggaccctgatgcaggacagccaggacttctcatcttatttatcagatggactacatttgtctccaaaggggaatgaatttttgttctcgcatctctggcctttgatagagaaaaaggtctcttctctacctttgctgcttccttactggcgggatgtagcagaagcaaaacctgaattaagtctgctgggagatggagaccattagccaatcacaggagacccaaatctgcttgttatctacagaactcaaagttgtcaatacgtagaggtacgcttttttcctcaggcttaaacctttgccactgatattaataataaaagtattagatgatttttcagggaagttttatacttaggtccattgtgtttcgacagtatttattaatgcagatatcagtgctacagctataaaatataccctgagcagcttgttaattctataaatgacaaagactatgtttttaaaaagtcacaattttataaaaatggtttttcttacattcttttgagaactgtttcactcatacatacacccacacaccccactcaaccttgtatcaaattccaaaagtgtaactaaagtataagaatatcatgactagttaaaagatagcaaataccataaggtacaagttcaagtattagtataacaagtatctgagtaacaaatgtccttggaaatggggggtaggaggagatatgattagtcacaggtttggttaactgccctcaaaatttacaagttaaaatgttttggctggtgagcacatttcagttcttaggggaaaaaaagcttttaatggcaatttatagaaatcagaatccaggctaatgatttttatccttcacacagtaaatgcagcccatccagaatcctggagcaataaagtaagaagtaattcaaatatctgcttgtgggtcaataaaaagggtttctgaagtatcaagtcttgtggggacagcccccaaccctaagggcaggtagtattctatctcctggctggctcatcacattcaaaacaacctgttttttttgttgttgttgttgttaagaaatatctcaccctcttattcaatagtgtttgaaaacaggcaatctttgtattttaaatagtctaggtttgtagatagtgaannnnnnnnnnnnnnnnnnnnnnnnnnnnnnnnnnnnnnnnnnnnnnnnnnnnnnnnnnnnnnnnnnnnnnnnnnnnnnnnnnnnnnnnnnnnnnnnnnnnnnnnnnnnnnnnnnnnnnnnnnnnnnnnnnnnnnnnnnnnnncatgtatccctatcagtaacagggatacatgaagatacttataaaatacagaaaaactgcccagcaaatcagggccctaaacagttggtagattccataaattcaactggctaccatgtatagccctcactgtaaggtaggtggttaggtttctagagagcattagtcttagaattatgaagagccatattaacccaaatgatttctaaatttagatatatattttccctgctacataaaaactctgggtaataactagaaatagacccacaatttagagacaatgtatactagatttatctcctttgtttttagttgaaggcaaaaanaaaaaaaaaaaaaaaactattccagttgtcatcacaaataaatgccaaatgcctcatattcagcggttcattacagtgtataaaaaaaaactgatcatttccctagtcagtgctgttatcaatataaaagattaatttacaaaaacgtaaatattcataacccaatccagctgtattttctgcttttgcaccacaggtcaaaagatattttaaaaactaaaacctgaaagcctcaaaataagctagattcaccttcaccttaccttttcaaaaggagaagggccaaaccacacaagaactgtttacctgcaggaagttcaaacacatgaccagcatctgctaagtcacttcccagtcttcacaaaatacaagctgtgattgatttgtaggtcaaatctataaaaatattttgcacacttaagtcagaagagctgagaactaaattagcactctgtttctttgctgtcaacacgattctgacgctgcagtttaaaggaggcagccttttcacttctggtgaccggatggtccgtgagatcctcaaatgacttggcagctgtgctgctatttgggaaggggtccttctcaaacccatcctcgtccatatgtgagtctgtgctggggtcttcctggatggtgtccattctctggtggtccagttttggagctgctggcgccgaagggatcacaggggcaggctgcaggcggcctggagtctggggcgcaggaaagggtttgataatgcgaaccgatgcagaatccatgctgctcagcatttcgacgttactggggtgaaacagagacagagattcatactgtttatccaatttcttatccacacaatggacaagaatgctgaaaggaatccaaaatatcaaggagaaaaccaggacagacccaacgatgttgtctgctaaaaactttccaaaagtattgatgctcagctggtcaatgaaatcccaaaatcgttcaattacatcctgtactcgtttctcacatttgccattcatgtcacaaaatcctactgtacagggctttcctttcctcaaaaataagttcttttgttcagcatcgacatagggcacacagcggccagaaaggtccctgcagcacaccttgcaggagttgtcagtttcattacatgcacaggactccagctgctgttccctctcgcagaaagggatgcatttcccatccttacacttgccaagatccaagcaaacagtgtcatcttcagcatttcctggaggcgggcactcactgctattacctgtgcagtaggacacgcctttgcaagtagcattaatcgcctcctggcacttcttctgggcagtctcaaactgacagtttttacagcaaggactgttcctgtcactgcactggacaccttccttcaacgtgcagtcgctgttgcagcaggtgtcgttgttcagatacatgatgccaggatcacactcttctccttcatccaccctcgagttcccacaaactttattgctgcgttcttgaaaacactcctgggccttactttcaatggtcttatagattgattgtttactgcagtttgaaaacatcttattgttctcgtgatcgccactcacagctatgggatacatgacatatttccctccctggtcctcattcggggcacattctgctagaccatccggatcatgttctgctccaaaattatgtcccaattcatgagttgtaaccaggtcagcttcctttgtaaggatggttttaccataattctttgtgctcgtcaaaccactattcaaatagatatttttcttcccaactgggctataataagcctttggacaaacacctccatggctgtttgctctgggagagccaacataagctaatccaagagttcccatatcaaaatcttggtatgtgaaaaggtgtgccaagcaaactttagatgcttcctcagctatatcaaagctaaattgctctagcaacatcttcacatcccaagcatccttttcttcatttgggtaactttttgccatgttgtagtgcttttcaccaggttttacctcttgtggagacttgagaatgcgaatctgctctatctgtattccatagcctttaaaacctgcattatcccatgaagtgttccgatagatgtcatcaactctgtcaattagctctattaagtaatttgtagttgtactctcttcccctctgcccatgtatctgtagaagcgatgatctgctaccaccaataatttacacgtgttcttcatgggatctgggtcagctcttcttttcactcgatgaacaagctcttcaggtggttctctgtctactaacccttttgggagcaactcttcattatccacttttaaataaccacacacttttggagactgcaaacgtgaaacattcttgatatcttcagatttataaactaacattcttttgtctttggtatcattaacaaatctccaaagtggctctatgttatattcggccccatctgtgttgattctgattataacatcatcatctcttatgtgggctagaaccctagagtcaggctcaccaaccacgtgtccagtgaagaagtcctgccattttacagtgtactcgctttcgtttttaccatccaccaccacgaccttgaaattttgtgaaaaacgttcagtacttgatgtcaggtataatttaaaatgccttttcaaagctgaaaaagttagtagtgtttctacatgtgttgaagtctgtagatctctttttcttaccgaatgctgctggatattagataaagagagaatatcgtagtctgagagcaaagaatcaagcttctcgagtctctggtgggggccgaagcccgggtcatccggaggtcgcggcgccagcacgaaaggaaccacgctggtcaggaataggagagactgcctcatgttcccggccccgctaccgactccacctctctgggcagccttcgcctgacggggtttcggaaaactgctcacatcgggggaggacgggatccgcccggcctagcccctcaatcctcttttccctcccgcgccgcctactgggaagattctaccgccaggctcgacgcccccggaagtgcaggtggcgttaccaaaggccgg

SEQ ID NO: 125 - DNA, 2805 bp, Homo sapiens
  misc_feature: Incyte ID No: 255772.2
gagcattggtaagcgtcacactgccaaagtgagagctgctggagaactcataatcccaggaacgcctcttctactctccgagtaccccagtgaccagagtgagagaagctctgaacgagggcacgcggcttgaaggactgtgggcagatgtgaccaagagcctgcattaagttgtacaatggtagatggagtgatgattcttcctgtgcttatcatgattgctctcccctcccctagtatggaagatgagaagcccaaggtcaaccccaaactctacatgtgtgtgtgtgaaggtctctcctgcggtaatgaggaccactgtgaaggccagcagtgcttttcctcactgagcatcaacgatggcttccacgtctaccagaaaggctgcttccaggtttatgagcagggaaagatgacctgtaagaccccgccgtcccctggccaagccgtggagtgctgccaaggggactggtgtaacaggaacatcacggcccagctgcccactaaaggaaaatccttccctggaacacagaatttccacttggaggttggcctcattattctctctgtagtgttcgcagtatgtcttttagcctgcctgctgggagttgctctccgaaaatttaaaaggcgcaaccaagaacgcctcaatccccgagacgtggagtatggcactatcgaagggctcatcaccaccaatgttggagacagcactttagcagatttattggatcattcgtgtacatcaggaagtggctctggtcttccttttctggtacaaagaacagtggctcgccagattacactgttggagtgtgtcgggaaaggcaggtatggtgaggtgtggaggggcagctggcaaggggaaaatgttgccgtgaagatcttctcctcccgtgatgagaagtcatggttcagggaaacggaattgtacaacactgtgatgctgaggcatgaaaatatcttaggtttcattgcttcagacatgacatcaagacactccagtacccagctgtggttaattacacattatcatgaaatgggatcgttgtacgactatcttcagcttactactctggatacagttagctgccttcgaatagtgctgtccatagctagtggtcttgcacatttgcacatagagatatttgggacccaagggaaaccagccattgcccatcgagatttaaagagcaaaaatattctggttaagaagaatggacagtgttgcatagcagatttgggcctggcagtcatgcattcccagagcaccaatcagcttgatgtggggaacaatccccgtgtgggcaccaagcgctacatggcccccgaagttctagatgaaaccatccaggtggattgtttcgattcttataaaagggtcgatatttgggcctttggacttgttttgtgggaagtggccaggcggatggtgagcaatggtatagtggaggattacaagccaccgttctacgatgtggttcccaatgacccaagttttgaagatatgaggaaggtagtctgtgtggatcaacaaaggccaaacatacccaacagatggttctcagacccgacattaacctctctggccaagctaatgaaagaatgctggtatcaaaatccatccgcaagactcacagcactgcgtatcaaaaagactttgaccaaaattgataattccctcgacaaattgaaaactgactgttgacattttcatagtgtcaagaaggaagatttgacgttgttgtcattgtccagctgggacctaatgctggcctgactggttgtcagaatggaatccatctgtctccctccccaaatggctgctttgacaaggcagacgtcatacccagccatgtgttggggagacatcaaaaccaccctaacctcgctcgatgactgtgaactgggcatttcacgaactgttcacactgcagagactaatgttggacagacactgttgcaaaggtagggactggaggaacacagagaaatcctaaaagagatctgggcattaagtcagtggctttgcatagctttcacaagtctcctagacactccccacgggaaactcaaggaggtggtgaatttttaatcagcaatattgcctgtgcttctcttctttattgcactaggaattctttgcattccttacttgcactgttactcttaattttaaagacccaacttgccaaaatgttggctgcgtactccactggtctgtctttggataataggaattcaatttggcaaaacaaaatgtaatgtcagactttgctgcattttacacatgtgctgatgtttacaatgatgccgaacattaggaattgtttatacacaactttgcaaattatttattacttgtgcacttagtagtttttacaaaactgctttgtgcatatgttaaagcttatttttatgtggtcttatgattttattacagaaatgtttttaacactatactctaaaatggacattttcttttattatcagttaaaatcacattttaagtgcttcacatttgtatgtgtgtagactgtaactttttttcagttcatatgcagaacgtatttagccattacccacgtgacaccaccgaatatattactgatttagaagcaaagatttcagtagaattttagtcctgaacgctacggggaaaatgcattttcttcagaattatccattacgtgcatttaaactctgccagaaaaaaataactattttgttttaatctactttttgtatttagtagttatttgtataaattaaataaactgttttcaagtcaaaaaaaaaaaaaaa

SEQ ID NO: 126 - DNA, 2835 bp, Homo sapiens
  misc_feature: Incyte ID No: 232066.3
gtctcccagatcagtacacaaaggctgctgctgccgccagaggaaggactgctctgcacgcacctatgtggaaactaaagcccagagagaaagtctgacttgccccacagccagtgagtgactgcagcagcaccagaatctggtctgtttcctgtttggctcttctaccactacggcttgggatctcgggcatggtggctttgccaatggtccttgttttgctgctggtcctgagcagaggtgagagtgaattggacgccaagatcccatccacaggggatgccacagaatggcggaatcctcacctgtccatgctggggtcctgccagccagccccctcctgccagaagtgcatcctctcacaccccagctgtgcatggtgcaagcaactgaacttcaccgcgtcgggagaggcggaggcgcggcgctgcgcccgacgagaggagctgctggctcgaggctgcccgctggaggagctggaggagccccgcggccagcaggaggtgctgcaggaccagccgctcagccagggcgcccgcggagagggtgccacccagctggcgccgcagcgggtccgggtcacgctgcggcctggggagccccagcagctccaggtccgcttccttcgtgctgagggatacccggtggacctgtactaccttatggacctgagctactccatgaaggacgacctggaacgcgtgcgccagctcgggcacgctctgctggtccggctgcaggaagtcacccattctgtgcgcattggttttggttcctttgtggacaaaacggtgctgccctttgtgagcacagtaccctccaaactgcgccacccctgccccacccggctggagcgctgccagtcaccattcagctttcaccatgtgctgtccctgacgggggacgcacaagccttcgagcgggaggtggggcgccagagtgtgtccggcaatctggactcgcctgaaggtggcttcgatgccattctgcaggctgcactctgccaggagcagattggctggagaaatgtgtcccggctgctggtgttcacttcagacgacacattccatacagctggggacgggaagttgggcggcattttcatgcccagtgatgggcactgccacttggacagcaatggcctctacagtcgcagcacagagtttgactacccttctgtgggtcaggtagcccaggccctctctgcagcaaatatccagcccatctttgctgtcaccagtgccgcactgcctgtctaccaggagctgagtaaactgattcctaagtctgcagttggggagctgagtgaggactccagcaacgtggtacagctcatcatggatgcttataatagcctgtcttccaccgtgacccttgaacactcttcactccctcctggggtccacatttcttacgaatcccagtgtgagggtcctgagaagagggagggtaaggctgaggatcgaggacagtgcaaccacgttccgaatcaaccagacggtgactttctgggtttctctccaagccacccactgcctcccagagccccatctcctgaggctccgggcccttggcttctcagaggagctgattgtggagttgcacacgctgtgtgactgtaattgcagtgacacccagccccaggctccccactgcagtgatggccagggacacctacaatgtggtgtatgcagctgtgcccctggccgcctaggtcggctctgtgagtgctctgtggcagagctgtcctccccagacctggaatctgggtgccgggctcccaatggcacagggcccctgtgcagtggaaagggtcactgtcaatgtggacgctgcagctgcagtggacagagctctgggcatctgtgcgagtgtgacgatgccagctgtgagcgacatgagggcatcctctgcggaggctttggtcgctgccaatgtggagtatgtcactgtcatgccaaccgcacgggcagagcatgcgaatgcagtggggacatggacagttgcatcagtcccgagggagggctctgcagtgggcatggacgctgcaaatgcaaccgctgccagtgcttggacggctactatggtgctctatgcgaccaatgcccaggctgcaagacaccatgcgagagacaccgggactgtgcagagtgtggggccttcaggactggcccactggccaccaactgcagtacagcttgtgcccataccaatgtgaccctggccttggcccctatcttggatgatggctggtgcaaagagcggaccctggacaaccagctgttcttcttcttggtggaggatgacgccagaggcacggtcgtgctcagagtgagaccccaagaaaagggagcagaccacacgcaggccattgtgctgggctgcgtagggggcatcgtggcagtggggctggggctggtcctggcttaccggctctcggtggaaatctatgaccgccgggaatacagtcgctttgagaaggagcagcaacaactcaactggaagcaggacagtaatcctctctacaaaagtgccatcacgaccaccatcaatcctcgctttcaagaggcagacagtcccactctctgaaggagggagggacacttacccaaggctcttctccttggaggacagtgggaactggagggtgagaggaagggtgggtctgtaagaccttggtaggggactaattcactggcgaggtgcggccaccaccctacttcattttcagagtgacacccaagagggctgcttcccatgcctgcaaccttgcatccatctgggctaccccacccaagtatacaataaagtcttacctccgcaacaacaaaaaaa

SEQ ID NO: 127 - DNA, 2409 bp, Homo sapiens
  misc_feature: Incyte ID No: 246504.1
caggcttgtgtagatcatgccgccagtagcggccctgactgccgaggaaacggtagcttaggacagttggctgttaagtgacactgattctccccgccccgcctgacccccgagaaggaggcttgtcccccgctgcgtgagggggtggggaagtgggtagtgaattcggatctacctgggaggggggagtggaagttcccgccccggagagcggcgaggcggcagccacagttgattatggaagattcccacaagagtaccacgtcagagacagcacctcaacctggttcagcagttcagggagctcacatttctcatattgctcaacaggtatcatctttatcagaaagtgaggagtcccaggactcatccgacagcataggctcctcacagaaagcccacgggatcctagcacggcgcccatcttacagaaaaattttgaaagacttatcttctgaagatacacggggcagaaaaggagacggagaaaattctggagtttctgctgctgtcacttctatgtctgttccaactcccatctatcagactagcagcggacagtacattgccattgccccaaatggagccttacagttggcaagtccaggcacagatggagtacagggacttcagacattaaccatgacaaattcaggcagtactcagcaaggtacaactattcttcagtatgcacagacctctgatggacagcagatacttgtgcccagcaatcaggtggtcgtacaaactgcatcaggagatatgcaaacatatcagatccgaactacaccttcagctacttctctgccacaaactgtggtgatgacatctcctgtgactctcacctctcagacaactaagacagatgacccccaattgaaaagagaaataaggttaatgaaaaacagagaagctgctcgagaatgtcgcagaaagaagaaagaatatgtgaaatgcctggaaaaccgagttgcagtcctggaaaatcaaaataaaactctaatagaagagttaaaaactttgaaggatctttattccaataaaagtgtttgattcctaagaaagaaaatatttttgtggacatgcataaaaattaaatggatttcctagtggagttttataaattaaaaggtcaaaactgaagctttttatttaggcttttccaaatcaaggataaatatcttacgcacgatatctagtgacagaggagaaagtggaaaatgacctcaaggaagctacgggcacaactggaagccttgtagaaattaaacatattcaaggagcaagaaatgaactttcagcagtctaaattttctaaataaccaatagttgccaatctaaaatggcagagaagatgaaatttgataaactgaattttttttaaaaatccatttaccctacaggtttgcatttgtttgctgaaatttacctttttttagttatatatatgtgtgtgtgtgtggtgtaatttctgccaataaattctaaattacaaaggtaagagaaaacctagtacattactaaatatataaagtatatgttctgattatgtatacttgttctagtgtcaagtctttttaagtgggtttttaaaagtttgttattggacttgaatggatttttgagactaggttaattatttttgaggtcttatcctaaaaggcatctaaggtacatgaatggagtatggtgattttataacattttttatcagaatggaaaaagaactgtttaaaagtttgatacttttaaatagttggtttttttgcttactctggtaatgattttctacaaatacataataaattgtttttttgattctatattctgtatgcagttgaatatccattacttattctgctgtgctttaatagaatggaatgtttacaggcccttaaaatattatttttaaaaaaccttctgaagatacataccaaagtttttccaagaagattttataatcaatttaataatgtaaggtttatcagattctataatagtatagttattaaggcaattttatgttagagactattttgtaatgtagtgagtggtacctttataagaaaagtgactgccaatatatttttatagctgatctttataaattctaatgttgagtttttaatgattattttaaatgtttatatagtttagtaaaatttgcatctcaaagtatcatttttatattatgggacgttttcagattggctaatatttgcattgtaaattttgtatgcagtttatctaaaattcaaaaatactgtcagtacaccagcgtttaacatctatattccaatttgtatacagtttaaaattgtactgcaaaactattgtgtgctcttacacagtatgcatcatattgttgtctgtgaaattaaaggacatttgatagtctactggaatgta

SEQ ID NO: 128 - DNA, 1939 bp, Homo sapiens
  misc_feature: Incyte ID No: 986123.22
  unsure 41: a, t, c, g, or other
aggggaccctctttcctaacggggttataaaaacagcgccntcggcggggtccagtcctctgccactctcgctccgaggtccccgcgccagagacgcagccgcgctcccaccacccacacccaccgcgccctgcgttcgcctcttctccgggagccagtccgcgccaccgccgccgcccaggccatcgccaccctccgcagccatgttccaccaggtccgtgtcctcgtcctcctaccgcaggatgttcggcggcccgggcaccgcgagccggccgagctccagccggagctacgtgactacgtccacccgcacctacagcctgggcagcgcgctgcgccccagcaccagccgcagcctctacgcctcgtccccgggcggcgtgtatgccacgcgctcctctgccgtgcgcctgcggagcagcgtgcccggggtgcggctcctgcaggactcggtggacttctcgctggccgacgccatcaacaccgagttcaagaacacccgcaccaacgagaaggtggagctgcaggagctgaatgaccgcttcgccaactacatcgacaaggtgcgcttcctggagcagcagaataagatcctgctggccgagctcgagcagctcaagggccaaggcaagtcgcgcctgggggacctctacgaggaggagatgcgggagctgcgccggcaggtggaccagctaaccaacgacaaagcccgcgtcgaggtggagcgcgacaacctggccgaggacatcatgcgcctccgggagaaattgcaggaggagatgcttcagagagaggaagccgaaaacaccctgcaatctttcagacaggatgttgacaatgcgtctctggcacgtcttgaccttgaacgcaaagtggaatctttgcaagaagagattgcctttttgaagaaactccacgaagaggaaatccaggagctgcaggctcagattcaggaacagcatgtccaaatcgatgtggatgtttccaagcctgacctcacggctgccctgcgtgacgtacgtcagcaatatgaaagtgtggctgccaagaacctgcaggaggcagaagaatggtacaaatccaagtttgctgacctctctgaggctgccaaccggaacaatgacgccctgcgccaggcaaagcaggagtccactgagtaccggagacaggtgcagtccctcacctgtgaagtggatgcccttaaaggaaccaatgagtccctggaacgccagatgcgtgaaatggaagagaactttgccgttgaagctgctaactaccaagacactattggccgcctgcaggatgagattcagaatatgaaggaggaaatggctcgtcaccttcgtgaataccaagacctgctcaatgttaagatggcccttgacattgagattgccacctacaggaagctgctggaaggcgaggagagcaggatttctctgcctcttccaaacttttcctccctgaacctgagggaaactaatctggattcactccctctggttgatacccactcaaaaaggacacttctgattaagacggttgaaactagagatggacaggttatcaacgaaacttctcagcatcacgatgaccttgaataaaaattgcacacactcagtgcagcaatatattaccagcaagaataaaaaagaaatccatatcttaaagaaacagctttcaagtgcctttctgcagtttttcaggagcgcaagatagatttggaataggaataagctctagttcttaacaaccgacactcctacaagatttagaaaaaagtttacaacataatctagtttacagaaaaatcttgtgctagaatactttttaaaaggtattttgaataccattaaaactgcttttttttttccagcaagtatccaaccaacttggttctgcttcaataaatctttggaaaaactcaagaaaaaaaaa

SEQ ID NO: 129 - DNA, 5024 bp, Homo sapiens
  misc_feature: Incyte ID No: 898945.14
  unsure 2112-2457: a, t, c, g, or other
gagacacagaaatcagtgtcactcagtgacagaagcaacaataattgtgaaaaatacttcagcagttatggactcatctgtcattcaaaggaaaaaagtagctgtcattggtggtggcttggttggctcattacaagcatgctttcttgcaaagaggaatttccagattgatgtatatgaagctagggaagatactcgagtggctaccttcacacgtggaagaagcattaacttagccctttctcatagaggacgacaagccttgaaagctgttggcctggaagatcagattgtatcccaaggtattcccatgagagcaagaatgatccactctctttcaggaaaaaagtctgcaattccctatgggacaaagtctcagtatattctttctgtaagcagagaaaatctaaacaaggatctattgactgctgctgagaaataccccaatgtgaaaatgcactttaaccacaggctgttgaaatgtaatccagaggaaggaatggtcacagtgcttggatctgacaaagttcccaaagatgtcacttgtgacctcattgtaggatgtgatggagcctattcaactgtcagatctcacctgatgaagaaacctcgctttgattacagtcagcagtacattcctcatgggtacatggagttgactattccacctaagaacggagattatgccatggaacctaattatctgcatatttggcctagaaatacctttatgatgattgcacttcctaacatgaacaaatcattcacatgtactttgttcatgccctttgaagagtttgaaaaacttctaaccagtaatgatgtggtagatttcttccagaaatactttccggatgccatccctctaattggagagaaactcctagtgcaagatttcttcctgttgcctgcccagcccatgatatctgtaaagtgctcttcatttcactttaaatctcactgtgtactgctgggagatgcagctcatgctatagtgccgttttttgggcaaggaatgaatgcgggctttgaagactgcttggtatttgatgagttaatggataaattcagtaacgaccttagtttgtgtcttcctgtgttctcaagattgagaatcccagatgatcacgcgatttcagacctatccatgtacaattacatagagatgcgagcacatgtcaactcaagctggttcatttttcagaagaacatggagagatttcttcatgcgattatgccatcgacctttatccctctctatacaatggtcactttttccagaataagataccatgaggctgtgcagcgttggcattggcaaaaaaaggtgataaacaaaggactctttttcttgggatcactgatagccatcagcagtacctacctacttatacactacatgtcaccacgatctttcctccgcttgagaagaccatggaactggatagctcacttccggaatacaacatgtttccccgcaaaggccgtggactccctagaacaaatttccaatctcattagcaggtgatagaaaggttttgtggtagcaaatgcatgatttctctgtgaccaaaattaagcatgaaaaaaatgtttccattgccatatttgattcactagtggaagatagtgttctgcttataattaaactgaatgtagagtatctctgtatgttaattgcaattactggttggggggtgcattttaaaagatgaaacatgcagcttccctacattacacacactcaggttgagtcattctaactataaaagtgcaatgactaagatccttcacttctctgaaagtaaggccctagatgcctcagggaagacagtaatcatgccttttctttaaaagacacaataggactcgcaacagcattgactcaacacctaggactaaaaatcacaacttaactagcatgttaactgcacttttcattacgtgaatggaacttacctaaccacagggctcagacttactagataaaaccagaaatggaaataaggaattcaggggagttccagagacttacaaaatgaactcattttattttcccaccttcaaatataagtattatcatctatctgtttatcgtctatctatctatcnnnnnnnnnnnnnnnnnnnnnnnnnnnnnnnnnnnnnnnnnnnnnnnnnnnnnnnnnnnnnnnnnnnnnnnnnnnnnnnnnnnnnnnnnnnnnnnnnnnnnnnnnnnnnnnnnnnnnnnnnnnnnnnnnnnnnnnnnnnnnnnnnnnnnnnnnnnnnnnnnnnnnnnnnnnnnnnnnnnnnnnnnnnnnnnnnnnnnnnnnnnnnnnnnnnnnnnnnnnnnnnnnnnnnnnnnnnnnnnnnnnnnnnnnnnnnnnnnnnnnnnnnnnnnnnnnnnnnnnnnnnnnnnnnnnnnnnnnnnnnnnnnnnnnnnnnnnnnnnnnnnnnnnnnnnnnnnnnnnnnnnnnncagagttaccctctaaagataagaaaaaggctattaatatcatactaagtgaaggacaggaaagggttttattcataaattaaatgtctacatgtgccagaatggaaaggaaacaaggggagacaacttttatagaaatacaaagccattactttattcaatttcagaccctcagaagcaatttactaatttattcttcgactacatactgcagcagaaccagcaatacacttgatttttaaaagcacatttagtgaaatgttttctttggttcatccttctttaacaggctgctgagtcactcagaaatccttcaaacatgattaattatgaagatgaaacactagagtcatataagaaataaaaattgggcaataaaataaaatgattcagtgtatcttttctatattgtcaatgaaaaccttgagttctaataatccatgttcagtttgtagggaaagaaaaaataatttttccttctacccactttaggttccttggctggggcccctataacaaaagacagattgacaagagaaaaacaaacataaatttattagcgggtatatgtaatatatatgtgggaaatacaggggaatgagcaaatctcaaagagctggcgtcttagaactccctggcttatatagcatcgacaaagaacagtaaatttttagagaaacaacaaaacaaagaaaaagagctttgagtctgtaggggcagcaatttgggggaagcaaatatatgggagtttgccttgtagattcctctggtggtggtctccaggctgacaaggattcaaagttgtctctgaaactcctctttgtcatactgcacatataaaacgtcttttgtttccaacaagaggatttctttttcattctagaattatctccttgataacttgatcagatataggacatgacactgaatagagtccaacagtacaaaaaaaattcagtatgttctagctacttcacacatgtgtacgcgacagttatttttacagtaaggtattttcgagaaaaatgcattacgtgttttggaaaatagagtaatttaaaaaatatatttgaaatgaaaatctccaacacattagaagatgatgatgttagatgcccatcgtgtgccacaagtggttttttcattatgtaaagcacccgttgaattaaaagaatttgtttttgttcaacctcttcctgaggcccaagagcatatgggcaattcggatttcctgctggaccacaaggttctgttgatattacatagaaacgggtattccagacacttcttatgatgaaagtccaaaagtggcatccaatttaaggccccatctttcgttgccattcttcattcctacaaaggacgaacttggattacatcaactttggacccattggttttgtcgctgtcgtcaactgacagtgattcatcactggtgatgataaaaatgatggaagaagagttgaaagtcacttttttctttggcctgtccccatctttctgtgacatcacaatgggtctgatctgcatttcacttccagctgctggtaggtctttagcaggcctctggcacctcagcagtcggaggcacagaagctgcaaaagggatcttcgaaactgggcagagaaaaaataaagtggaatattaagtaaaagttgggcactaatctggattaacattcgaggaaatcagttgagctgaatttaagttgttttttgtttgttagcaggtgtggatgtggggttatgtggtcatgctcagatctacctaaatcaccccagagctttatgtcttttattcattctaattcttattaaccggaatatgtaggaccatttcaataccttgtaatcctccaagcttcaatctgcacacactttctatgagggcaggtacaactattaagagattttgaacattaagttagtccacaaatattcagtgggcatctactaggtgacagccactgtgctataattagagactttttactataagcatcaaaaacagataaggctcttcctggcagagtttacagcctggtgtacttgctaatgtctctttaattaggtgaagaattttttttttctatcgaaattactaatcagttggggaaaaaaatactatagcagacagcactaatgtcatcaacaaacattgttcttctccgtgtcctgggtacaacatccaataatatttcttggcctcctttccgcttctcctctctgctgttcctctctacaagaacctggggggccaacgcctaaagatcataatatcacacaatggaaggaacctagattcctaaatgactgcataggacagatcccatctcctccacccaatacattattagactgaactgtgacctgaaatgagcaataaactctgtattaattcactgaaatgttggggttgcttgttatagtagtcggtccatcatgaccagtaaaacataaatcaaaagttaatgtaattgttatcccattatttagagcgaaataaatgttgaatatatggactttctcagattaggaaataccaattaaaaatataataaatagct

SEQ ID NO: 130 - DNA, 4563 bp, Homo sapiens
  misc_feature: Incyte ID No: 236208.16
cagttttcattgttttcagtaagctgacctccaaaggcatagatgtgagctttcttttgaaaggaaatgaagtattcaccgttaaggataaggatgtttgtaatgtgacagtgttaatgctagctaaatgagaaagccatatatgaatacttagactgttgctacctgggagcattatttattgacctgtgccttcgtcagagcttcagatgtgaggggaatgatgctaatagaatcatgtaaagatgtttgtcattaaaaagtcacatcgcaattaatagattcagaattcatcgagtcctcttgctctgtgtcacacccgctgcctctgtgacaaccttcatttcctacttagcaaatccaagcctggtagctggagccccaggaagttgttaaagcaattaaaggcttctgtctcccagcacattgcttggttaccatagtatcctctgcctccaagtctctcctgatgatgtcagtatgcatacaggggttgttcagatcatctacgtggggatgattcaccccacaataaagcccctctctctcgttgctcgctttccagtgtgatttcagacatctgtagcaatggaaggttctgaatgatgactgacgcgggtttgggtgatacccctcacagcccctgtcattccggagtgataaggcacccgcgcgtctagccccagcgccagggcacgcgagcggcgctggagggaggaaagcttccgcctgcgggccggacaaaagtcccgcctgcccacggctttttgcccgccgctcgtgaccgagacgcctcgccgcggccagctcgctgctctcgctggcggatggtgtgtggccgccgcaggacgcccgccgtgcccgggccatgaagtagcggctgctggcggcgccgctgcccaaccgccagccccagccccgcgctgcgctgcccggtcctctcccggcggggtcgtatcggcgtggacatggctggccgcgtccctagcctgctagttctccttgtttttccaagcagctgtttggctttccgaagcccactttctgtctttaagaggtttaaagaaactaccagaccattttccaatgaatgtcttggtaccaccagacccgtagttcctattgattcatcagattttgcattggatattcgcatgcctggggttacacctaaacagtccgatacatacttctgcatgtctatgcgaataccagtggatgaggaagccttcgtgattgacttcaagcctcgagccagcatggatactgtccatcacatgttactttttggatgcaatatgccttcatccactggaagttactggttttgtgatgaaggaacctgtacagataaagccaatattctgtatgcctgggcgagaaatgctccccctacccggctccccaaaggtgttggattcagagttggaggagagactggaagtaaatactttgtactacaggtacactatggggatattagtgcttttagagataataacaaggactgttctggtgtgtccttacacctcacacgtctgccacagcctttaattgctggcatgtaccttatgatgtctgttgacactgttatcccagcaggagaaaaagtggtgaattctgacatttcatgccattataaaaattatccaatgcatgtctttgcctatagagttcacactcaccatttaggtaaggtagtaagtggatacagagtaagaaatggacagtggacactgattggacggcagagccctcagctgccacaggctttctaccctgtggggcatccagttgatgtaagttttggtgacctactggctgcaagatgtgtattcactggtgaaggaaggacagaagccacacacattggtggcacgtctagtgatgaaatgtgcaacttatacattatgtattacatggaagccaagcatgcagtttctttcatgacctgtacccagaatgtagctccagatatgttcagaaccataccaccagaggccaacattccaattcccgtgaagtctgatatggttatgatgcatgaacaactcataaagcttctttgatcctttacagaaacagaatataaagataagattcctttactacagcagccaaaacgagaagaagaagaagtgttagaccagggtgatttctattcactactttccaagctgctaggagaaagggaagatgttgttcatgtgcacaaatataatcctacagaaaaggcagaatcagagtcagacctggtagctgagattgcaaatgtagtccaaaaaaaggatcttggtcgatctgatgccagagagggtgcagaacatgagaggggtaatgctattcttgtcagagacagaattcacaaattccacagactagtatctaccttgaggccaccagagagcagagttttctcattacagcagcccccacctggtgaaggcacctgggaaccagaacacacaggagatttccacatggaagaggcactggattggcctggagtatacttgttaccaggccaggtttctggggtggctctagaccctaagaataacctggtgattttccacagaggtgaccatgtctgggatggaaactcgtttgacagcaagtttgtttaccagcaaataggactcggaccaattgaagaagacactattcttgtcatagatccaaataatgctgcagtactccagtccagtggaaaaaatctgttttacttgccacatggcttgagtatagataaagatgggaattattgggtcacagacgtggctctccatcaggtgttcaaactggatccaaacaataaagaaggccctgtattaatcctgggaaggagcatgcaaccaggcagtgaccagaatcacttctgtcaacccactgatgtggctgtggatccaggcactggagccatttatgtatcagatggttactgcaacagcaggattgtgcagttttcaccaagtggaaagttcatcacacagtggggagaagagtcttcagggagcagtcctctgccaggccagttcactgttcctcacagcttggctcttgtgcctcttttgggccaattatgtgtggcagaccgggaaaatggtcggatccagtgttttaaaactgacaccaaagaatttgtgagagagattaagcattcatcatttggaagaaatgtatttgcaatttcatatataccaggcttgctctttgcagtgaatgggaagcctcattttggggaccaagaacctgtacaaggatttgtgatgaacttttccaatggggaaattatcgacatcttcaagccagtgcgcaagcactttgatatgcctcatgatattgttgcatctgaagatgggactgtgtacattggagatgctcataccaacaccgtgtggaagttcaccttgactgagaaattggaacatcgatcagttaaaaaggctggcattgaggtccaggaaatcaaagaagccgaggcagttgttgaaaccaaaatggagaacaaacccacctcctcagaattgcagaagatgcaagagaaacagaaactgatcaaagagccaggcctcgggagtgcctgttgttctcattacaacccttctggttattccggtggttgtcctgctggccattgccatatttattcggtggaaaaaatcaagggcctttggagcagattctgaacacaaactcgagacgagttcaggaagagtactgggaagatttagaggaaagggaagtggaggcttaaaccttggtaatttctttgcaagccgtaagggctacagtcgaaaagggtttgaccggcttagcactgagggcagtgaccaagagaaagaggatgatggaagtgaatcagaagaggagtattcagcacctctgcctgcgctcgcaccttcctcctcctgaaaaccaagctttgatttagattgagtaagatttacccagaatgtcagattcctttccctttagcacgtttaaagttctgtgtatttaattgtaaactgtactagtctgtgtgggactgtacacactttatttacttcgttttggttaagttggcttctgtttctagttgaggagtttcctaaaagttcataacagtgccattgtctttatatgaacatagactagagaaaccgtcctctttttccatcataattctaatctaacaatggaagatttgcccatttacacttttgagactttttggtggatgtaaataaccccattctttgcttgaacacagtattttcccaatagcactttcattgccagtgtctttctttggtgcctttcctgttcagcattcttagcctgtggcaataaagagaaactttgtgctacatgacgacaaagctgctaaatctcctatttttttaaaatcactaacattatattgcaatgaaggaaataaaaaagtctctatttaaattcttttttaaattttcttcagttggtgtgtttttgggatgtcttatttttagatggttacactgttagaacactattttcagaatctgaatgtaatttgtgtaataaagtgtttcagagcat

SEQ ID NO: 131 - DNA, 1630 bp, Homo sapiens
  misc_feature: Incyte ID No: 246531.2
agctgagctgcgggctgaatgtcaggtgatgcgtcctgacctcttcctgagcacctagtgtgtgccctgtgctgggcccaggaggcatgctgggggcaatgtgggcctcaaggaggaggtcgggtgatgaggggccaacccaggggcatggtctagtggcccagtcaggacgcggaaacactccctggaggttctgacccgctccctctcagcctccgcctggtctctggtgtagtcgccgccgccagccgccatgggcaaacagaacagcaagctgcggcccgaggtgctgcaggacctgcgggagaacacggagttcaccgaccacgagctgcaggagtggtacaagggcttcctcaaggactgccccaccggccacctgaccgtggacgagttcaagaagatctacgccaacttcttcccctacggcgacgcttccaagttcgccgagcacgtcttccgcaccttcgacaccaacggcgacggcaccatcgacttccgggagttcatcattgcgctgagcgtgacctcgcggggcaagctggagcagaagctcaagtgggccttcagcatgtacgacctggacggcaacggctacatcagccgcagcgagatgctggagatcgtgcaggccatctacaagatggtgtcgtctgtgatgaagatgccggaggatgagtccaccccggagaagcgcacagacaagatcttcaggcagatggacaccaacaatgacggcaaactgtccttggaagaattcatcagaggtgccaagagcgacccctccatcgtccgcctgctgcagtgcgaccccagcagtgccagtcagttctgagcgagcggcccctggacagttgcagagaaacacaggcttgtcgtgccgtttaagctttgcttgcaagagtggatgccccgcaatcgttcctgctctcccgggccccgggcctggggcatgcgttgcacctgcccggcccggtggctgcgcctccctcctccacctgaccaacgcgacattcctcccctcacgcctggcccggtcccttccagggcaactcccagggatgtggtgacatgcagggttcaagtgttcttggttccaggcacctcccggctcacggggagctcagaggtccatgccgaggagaccaggcaggacctcccgaggctgcgccccggccggcccatgcgttttgtgatcccaagtgactctgtgggaagggtggggacgaggcgtcgggagggtatacagggagcccctcccgtgcatggctgcccccccgttcattttctccaccacagccgcttgcacgtatagatactgtggtcccctttcttttaatatataaattatgtatggtgaagtggagtgtattgtgtaggtcccgtatttaatgcctctgactgcctttgaagcgcagccctctgtggcccgcagccccctgagcctggctgttgtgtggtatttatgctctctttgtctgcctgtttctaaggaaatgcatgtgtgccctgagccgtgatgatcctcccatccgtgttgtgagcacaggcatttgtgtctggtctgtcctccctgttgattggtctggcatttccggtattaaaatgataaaataaatggcattttctg

SEQ ID NO: 132 - DNA, 1258 bp, Homo sapiens
  misc_feature: Incyte ID No: 238586.2
  unsure 1007: a, t, c, g, or other
gaaaaataacacatactttcaaagttctgtagactctaaaaagaaagaaaacactcaaatgagtcacctatttccacattcgaggctgagaagctatataaatttctgcagtcactagcagaaaacaccaaatcaaccataggtccaagaacaattgtctctggacggcatgctatgcgactcaccgtgctgtgtgctgtgtgcctgctgcctggcagcctggccctgccgctgcctgcaggaggcgggaggcatgagtgagctacagtgggaacaggctcaggactatctcaagagattttatctctatgactcagaaacaaaaaatgccaacagtttagaagccaaactcaaggagatgcaaaaattctttggcctacctataactggaatgttaaactcccgcgtcatagaaataatgcagaagcccagatgtggagtgccagatgttgcagaatactcactatttccaaatagcccaaaatggacttccaaagtggtcacctacaggatcgtatcatatactcgagacttaccgcatattacagtggatcgattagtgtcaaaggctttaaacatgtggggcaaagagatccccctgcatttcaggaaagttgtatggggaactgctgacatcatgattggctttgcgcgaggagctcatggggactcctacccatttgatgggccaggaaacacgctggctcatgcctttgcgcctgggacaggtctcggaggagatgctcacttcgatgaggatgaacgctggacggatggtagcagtctagggattaacttcctgtatgctgcaactcatgaacttggccattctttgggtatgggacattcctctgatcctaatgcagtgatgtatccaacctatggaaatggagatccccaaaattttaaactttcccaggatgatattaaaggcattcagaaactatatggaaagagaagtaattcaagaaagaaatagaaacttcaggcagaacatccattcattnattcattggattgtatatcattgttgcacaatcagaattgataagcactgttcctccactccatttagcaattatgtcacccttttttattgcagttggtttttgaatgtctttcactccttttaaggataaactcctttatggtgtgactgtgtcttattcatctatacttgcagtgggtagatgtcaataaatgttacatacacaaataaataaaatgtttattccatggtaaatttaaaaaaaaaaaa

SEQ ID NO: 133 - DNA, 2127 bp, Homo sapiens
  misc_feature: Incyte ID No: 245532.7
agctgaggtgtgagcagctgccgaagtcagttccttgtggagccggagctgggcgcggattcgccgaggcaccgaggcactcagaggaggcgccatgtcagaaccggctggggatgtccgtcagaacccatgcggcagcaaggcctgccgccgcctcttcggcccagtggacagcgagcagctgagccgcgactgtgatgcgctaatggcgggctgcatccaggaggcccgtgagcgatggaacttcgactttgtcaccgagacaccactggagggtgacttcgcctgggagcgtgtgcggggccttggcctgcccaagctctaccttcccacggggccccggcgaggccgggatgagttgggaggaggcaggcggcctggcacctcacctgctctgctgcaggggacagcagaggaagaccatgtggacctgtcactgtcttgtacccttgtgcctcgctcaggggagcaggctgaagggtccccaggtggacctggagactctcagggtcgaaaacggcggcagaccagcatgacagatttctaccactccaaacgccggctgatcttctccaagaggaagccctaatccgcccacaggaagcctgcagtcctggaagcgcgagggcctcaaaggcccgctctacatcttctgccttagtctcagtttgtgtgtcttaattattatttgtgttttaatttaaacacctcctcatgtacataccctggccgccccctgccccccagcctctggcattagaattatttaaacaaaaactaggcggttgaatgagaggttcctaagagtgctgggcatttttattttatgaaatactatttaaagcctcctcatcccgtgttctccttttcctctctcccggaggttgggtgggccggcttcatgccagctacttcctcctccccacttgtccgctgggtggtaccctctggaggggtgtggctccttcccatcgctgtcacaggcggttatgaaattcaccccctttcctggacactcagacctgaattctttttcatttgagaagtaaacagatggcactttgaaggggcctcaccgagtgggggcatcatcaaaaactttggagtcccctcacctcctctaaggttgggcagggtgaccctgaagtgagcacagcctagggctgagctggggacctggtaccctcctggctcttgatacccccctctgtcttgtgaaggcagggggaaggtggggtcctggagcagaccaccccgcctgccctcatggcccctctgacctgcactggggagcccgtctcagtgttgagccttttccctctttggctcccctgtaccttttgaggagccccagctacccttcttctccagctgggctctgcaattcccctctgctgctgtccctcccccttgtcctttcccttcagtaccctctcagctccaggtggctctgaggtgcctgtcccacccccacccccagctcaatggactggaaggggaagggacacacaagaagaagggcaccctagttctacctcaggcagctcaagcagcgaccgccccctcctctagctgtgggggtgagggtcccatgtggtggcacaggcccccttgagtggggttatctctgtgttaggggtatatgatgggggagtagatctttctaggagggagacactggcccctcaaatcgtccagcgaccttcctcatccaccccatccctccccagttcattgcactttgattagcagcggaacaaggagtcagacattttaagatggtggcagtagaggctatggacagggcatgccacgtgggctcatatggggctgggagtagttgtctttcctggcactaacgttgagcccctggaggcactgaagtgcttagtgtacttggagtattggggtctgaccccaaacaccttccagctcctgtaacatactggcctggactgttttctctcggctccccatgtgtcctggttcccgtttctccacctagactgtaaacctctcgagggcagggaccacaccctgtactgttctgtgtctttcacagctcctcccacaatgctgaatatacagcaggtgctcaataaatgattcttagtgactttaaaaaaa

SEQ ID NO: 134 - DNA, 2192 bp, Homo sapiens
  misc_feature: Incyte ID No: 200972.2
ggggccccacacaggccgcggcggctggctcgggcccctacggtcccggcggcggctggaggaggaagccaggcggctggcggaggaggagagacggaggaggccgagaccggagcgccgctcgccgcagacttacttccccggctcagcagggaaaggttcctagaaggtgagcgcggacggtatgcaaagttgtgaatccagtggtgacagtgcggatgaccctctcagtcgcggcctacggagaaggggacagcctcgtgtggtggtgatcggcgccggcttggctggcctggctgcagccaaagcacttcttgagcagggtttcacggatgtcactgtgcttgaggcttccagccacatcggaggccgtgtgcagagtgtgaaacttggacacgccacctttgagctgggagccacctggatccatggctcccatgggaaccctatctatcatctagcagaagccaacggcctcctggaagagacaaccgatggggaacgcagcgtgggccgcatcagcctctattccaagaatggcgtggcctgctaccttaccaaccacggccgcaggatccccaaggacgtggttgaggaattcagcgatttatacaacgaggtctataacttgacccaggagttcttccggcacgataaaccagtcaatgctgaaagtcaaaatagcgtgggggtgttcacccgagaggaggtgcgtaaccgcatcaggaatgaccctgacgacccagaggctaccaagcgcctgaagctcgccatgatccagcagtacctgaaggtggagagctgtgagagcagctcacacagcatggacgaggtgtccctgagcgccttcggggagtggaccgagatccccggcgctcaccacatcatcccctcgggcttcatgcgggttgtggagctgctgggcggagggcatccctgcccacgtcatccagctagggaaacctgtccgctgcattcactgggaccaggcctcagcccgccccagaggccctgagattgagccccggggtgagggcgaccacaatcacgacactggggagggtggccagggtggagaggagccccgggggggcaggtgggatgaggatgagcagtggtcggtggtggtggagtgcgaggactgtgagctgatcccggcggaccatgtgattgtgaccgtgtcgctaggtgtgctaaagaggcagtacaccagtttcttccggccaggcctgcccacagagaaggtggctgccatccaccgcctgggcattggcaccaccgacaagatctttctggaattcgaggagcccttctggggccctgagtgcaacagcctacagtttgtgtgggaggacgaagcggagagccacaccctcacctacccacctgagctctggtaccgcaagatctgcggctttgatgtcctctacccgcctgagcgctacggccatgtgctgagcggctggatctgcggggaggaggccctcgtcatggagaagtgtgatgacgaggcagtggccgagatctgcacggagatgctgcgtcagttcacagggaaccccaacattccaaaacctcggcgaatcttgcgctcggcctggggcagcaacccttacttccgcggctcctattcatacacgcaggtgggctccagcggggcggatgtggagaagctggccaagcccctgccgtacacggagagctcaaagacagcgcccatgcaggtgctgttttccggtgaggccacccaccgcaagtactattccaccacccacggtgctctgctgtccggccagcgtgaggctgcccgcctcattgagatgtaccgagacctcttccagcaggggacctgagggctgtcctcgctgctgagaagagccactaactcgtgacctccagcctgccccttgctgccgtgtgctcctgccttcctgatcctctgtagaaaggatttttatcttctgtagagctagccgccctgactgccttcagacctggccctgtagcttttctttttctccaggctgggccgtgagcaggtgggccgttgagttacctctgtgctggatcccgtgcccccacttgcctaccctctgtcctgccttgttattgtaagtgccttcaatactttgcattttgggataataaaaaaggctccctcccctgcccctcagcttctctctggttttctc

SEQ ID NO: 135 - DNA, 3075 bp, Homo sapiens
  misc_feature: Incyte ID No: 348061.1
tggcggggggagaaatggcagtaggcattccgtcccgcttataagggccccggaccgccgcggctcgcctcggcttgcctcgacacgcctaggcgccctccggctccgccctagccgccgcgtcccagctagagctccagcgcccgctcaggccccactcgaccctctcgggcctcggctacttggactgcggcggaatatggcggctccgatgactcccgcggctcggcccgaggactacgaggcggcgctcaatgccgccctggctgacgtgcccgaactggccagactcctggagatcgacccgtacttgaagccctacgccgtggacttccagcgcaggtataagcagtttagccaaattttgaagaacattggagaaaatgaaggtggtattgataagttttccagaggctatgaatcatttggcgtccacagatgtgctgatggtggtttatactgcaaagaatgggccccgggagcagaaggagtttttcttactggagattttaatggttggaatccattttcgtacccatacaaaaaactggattatggaaaatgggagctgtatatcccaccaaagcagaataaatctgtactcgtgcctcatggatccaaattaaaggtagttattactagtaaaagcggagagatcttgtatcgtatttcaccgtgggcaaagtatgtggttcgtgaaggtgataatgtgaattatgattggatacactgggatccagaacactcatatgagtttaagcattccagaccaaagaagccacggagtctaagaatttatgaatctcatgtgggaatttcttcccatgaaggaaaagtagcttcttataaacattttacatgcaatgtactaccaagaatcaaaggccttggatacaactgcattcagttgatggcaatcatggagcatgcttactatgccagctttggttaccaaatcacaagcttctttgcagcttccagccgttatggaacacctgaagagctacaagaactggtagacacagctcattccatgggtatcatagtcctcttagatgtggtacacagccatgcttcaaaaaattcagcagatggattgaatatgtttgatgggacagattcctgttattttcattctggacctagagggactcatgatctttgggatagcagattgtttgcctactccagctgggaagttttaagattccttctgtcaaacataagatggtggttggaagaatatcgctttgatggatttcgttttgatggtgttacgtccatgctttatcatcaccatggagtgggtcaaggtttctcaggtgattacagtgaatatttcggactacaagtagatgaagatgccttgacttacctcatgttggcaaatcatttggttcacacgctgtgtcccgattctataacaatagctgaggatgtatcaggaatgccagctctgtgctctccaatttcccagggagggggtggttttgactatcgactagccatggcaattccagataagtggattcagctacttaaagagtttaaagatgaagactggaacatgggcgatatagtatacacgctcacaaacaggcgctaccttgaaaagtgcattgcttatgcagagagccatgatcaggcattggttggggataagtcgctggcattttggttgatggatgccgaaatgtatacaaacatgagtgtcctgactccttttactccagttattgatcgtggaatacagcttcataaaatgattcgactcattacgcatgggcttggtggagaaggctatctcaatttcatgggtaatgaatttgggcatcctgaatggttagacttcccaagaaaaggaaataatgagagttaccattatgccaggcggcagtttcatttaactgacgacgaccttcttcgctacaagttcctaaataattttgacagggatatgaatagattggaagaaagatatggttggcttgcagctccacaggcctacgtgagtgaaaaacatgaaggcaataagatcattgcttttgaaagagcaggtcttcttttcattttcaacttccatccaagcaagagctacactgactaccgagttggaacagcattgccagggaaattcaaaattgtgctagattcagatgcagcggaatatggagggcatcagagactggaccacagcactgactttttttctgaggcttttgaacataatgggcgtccctattctcttttggtgtacattccaagcagagtggccctcatccttcagaatgtggatctgccgaattgaagaggcctgatttcagctccaccagatgcagatttgtgttttgttttcttgttatcactgtcacacagcttataacatgtatgcttttcagaatacagttgtctagccaagccatcaagtgtctgaaattcaatattggtttatgcaaatacagcaaacttttatttaagtagatgggagaatatgtttaaaatattaggaatcctagaccatattttcaagtcatcttagcagctaggattctcaaatggaagtgttatatataatatgttaaaaacattttgctttcctggctaattatttgatccttttaaattcaaatttgaatcatttgtcatgtatgattatttctgttaaatgtacacagtatttaagatggatatttggtggctctatttgttctgatatcttttggtctaaattatgaggtaccaagattgtttctttgtttctttttttcaaattgtgtttagaaatactgtaataaatatgcagtagtgatataaagaattatatccaaggtaatataaaagccattacgtatgaactcatccgtgtctcattttgtgttttattttgtgatctcttgtccactaagtatcttgttaaatgccagtatctcagtctttctgaagccctgaaatggtaattgtagcatttcagaaaatgtctttcatttcaatcaataaaaagcttttgtacatgtgaaaaaaaaaaaatataaagattttaattaagcggtcgaagcttattccctttagtgagta

SEQ ID NO: 136 - DNA, 4889 bp, Homo sapiens
  misc_feature: Incyte ID No: 233711.7
acttgagtctcgaaccactgcatctccgactctctgcccagactcttcactccgcggcaccctcaaaccccagcccaggccggggcgcacaagccagccagcgcacctgcagtcctcgcccggacgcgccgcgccccctcggaaccaggctctgctccgagcagccttcgcccctcaagccagccacagtccccgccaggccgggtgggcgtcaagatgaaggcggcccgcttcgtgctgcgcagcgctggctcgctcaacggcgccggcctggtgccccgagaggtggagcatttctcgcgctacagcccgtccccgctgtccatgaagcagctactggactttggttcagaaaatgcatgtgaaagaacttcttttgcatttttgcgacaagaattgcctgtgagactcgccaacattctgaaggaaattgatatcctcccgacccaattagtaaatacctcttcagtgcaatgggttaaaagctggtatatacagagcctgatggatttggtggaattccatgagaaaagcccagatgaccagaaagcattatcagactttgtagatacactcatcaaagttcgaaatagacaccataatgtagtccctacaatggcacaaggaatcatagagtataaagatgcctgtacagttgacccagtcaccaatcaaaatcttcaatatttcttggatcgattttacatgaaccgtatttctactcggatgctgatgaaccagcacattcttatatttagtgactcacagacaggaaacccaagccacattggaagcattgatcctaactgtgatgtggtagcagtggtccaagatgcctttgagtgttcaaggatgctctgtgatcagtattatttatcatctccagaattaaagcttacacaagtgaatggaaaatttccagaccaaccaattcacatcgtgtatgttccttctcacctccatcatatgctctttgaactatttaagaatgcaatgcgggcaacagttgaacaccaggaaaatcagccttcccttacaccaatagaggttattgttgtcttgggaaaagaagaccttaccattaagatttcagacagaggaggtggtgttcccctgagaattattgaccgcctctttagttatacatactccactgcaccaacgcctgtgatggataattcccggaatgctcctttggctggttttggttacggcttgccaatttctcgtctgtatgccaagtactttcaaggagatctgaatctctactctttatcaggatatggaacagatgctatcatctacttaaaggctttgtcttctgagtctatagaaaaacttccagtttttaacaagtcagccttcaaacattatcagatgagctctgaggctgatgactggtgtatcccaagcagggaaccaaagaacctggcaaaagaagtggccatgtgaagagggacactcaggacactttacgggatcaaagtgggtctacaccagtgctgcttcctgaatgtttgtgtgtgaacccttgtttcctccaaaacaaacgacagcaacgaaaactccttaatcagaacactgatccaatgaggaatggagcttgtttctgtgacccaggagaacttagtgcaagactacaggagttaacagatggccagctccttattttttaatgtagaataactcctgagtttatatcaaatcctgaagaaataagcctcagttttccatctgtttttgataagaataagaaagggagtgagtgtgaagatggtggttagcagtttcactaagactgatattttaggcctcttgttcacatcaaaagatattggtgtcagaataccagcattttcctgccatgcaaaggattaaaacttagtttacactatgtggttacaaatatatgtcaatgtacattttgaacatatttatgtgctatggaaggaaatgctggtgactaaaataaggtttactctgaaagaggaggaattttattcaaagcattcaaacattttattcaagtgtttcaaaattcaaagcattgtattcaaagttgcagtgaaggcatcaacttatgtaaaaactcagaaggaaggctcctctgataaaaacacagctcctttattatgctgcttttcttgttcactttacacactaagtaaacacttattgtcaggtgcctagtcttgagtgaattgttagatgtgcactgaactcgggatgttggggattggagagagagaattgccaaagtaacagcaaaaatatctcttactttgctttgtttataaataaattagtagattggaaaaactagtgttagggaaagaaatcacatgttcagagcctaattcagtaggaagggcttttctctaccctgaaatgaaggtaatccaaaggcatccattttctaggcttaaaagatatatttttgatatatttaattatattctctacactccagcattaatatgtctgtttaaaaattactaattctcaaatggctcaagaacattagaatttaagtaccttttagagtaattattttaagcaaatagcctggacgtaagagattctcatgccagcatgctttcatttgtcagttgttgtgactgagagataatgaatgacacctgaaatgcatatggtatttttgggagagttaaggtataatttgaaggttggcagaccagttgtgctgattactcttagagaagaagaaatggaaaaatgaaagaaggcaggaaggaaagaaaggatataggaagagagggaagcagaaggcaggcatttttctattttccccacaaattatttcaaaaaaaatctgtattttctgggatatgtcattggcaagaggaagaactggtgttttgaaagcagtatggattctttaaatgcctctcactcttacaagatagtaggctttgagataataaacttacccgtgtcaattaacatttaaactggcatatagaaaaaaaggaggatttttctgcattgtaaaataatcagtatggtttatatgttgaatttgacatttgtgtgtaatttcatggtggcctagtgttgtggtgcttctggtaatggtaatagaagctcaactatttttttgtggatttcagtttttatcatcagaagtcctagacagtgacatttcttaatggtgggagtccagctcatgcatttctgattatacaaaacagtttgcagtaggttatttgtcatttcagttttttactgaaatttgagctaaacatttttacatgtaaatacttgtatttaccaaagatttaaatcagttgattaattaattaactcaaatactgtgaactatctctaaaacactagaaaaaagaaatgttagtatctcaattacaccaactgtgcaaatgaactttgataaaatagaaataatctacattggcctttgtgaaatctggggaagagctttaggattctagtagatggatactgaatactcaggcccacttaaattattaatgtatacattgtgtttttgtctttatgctatgtacagagaaatgtgataattttttataataaatattttttatgatgataaaagacaatttcttgtaacttaaaaataaagtatatatctagaaaccaccacattaacatctactatttatagtacaatctccaattcaaagctaatctttgtatttctgtattttgcaacttttgagctagaatcttcctccctatccaactatactgttatgtaaccccattgttttaacatttaacaatacaacttgggtattctctgacaagcaagaatatatactattgatcacttctatacacaaaataaaaacagttcaaatgactagaaactaattttacaaaagaaaaaaaaacaggttagtaaaacatttcttttgaaaacaatgggtgaattagtattctgaattgagctagagcacatttttgcttgaagactctccatattaggcactatgcatttatatagtacagaacatttgcaaaatgcttttcaccatttattaggactcacaacacctgggcgctggggaatagccggactacctcagtttacacagggagaaccaaggcacactgtgagatcttgccagggccagagtgagacctcattagcttctgacttcttgtaggaagagccagatgtttctttgtggaggacattaatttgtttaatgataggagtaaaagtatgtgagatttgttgtgggaaaattagtttgggctccataaataaaaagttcagagcatggataaagtagagatttcactgtgaaaagggtcaatgaggagaagttaaaaccagatataaggctcttttcagacagatcacttttcagaaataaaaatagcaaaacgagaataggaaaaaaatagctatagagtttttcatttctaacccaaggggctttgataaaatcactttaaaagaaggatctctctcttaaaacaacccttaaacatcttattttttccccctcataagacccctgtgaggtagagagcacttacttacagggatgaagctaagaagtaaagttaagagtttaaaaccacatggatagtgaacaggctggagcagatgttatgtcttaaagcattggcttagaaatagaaacagaaggtagagaataaacaggaacttttatggatggacaagtggaataatccagggatctagtagcaacaccagctacttaacatttcttttaaaaaggacttggaatttcaagtatgtgatgaggcctaaaatgacaaacacttgtctgggtattgaaatgctcagctgaagggaatatatgcaatatgttctcataagaccatgtgggaaaaagcagaggcataaaagagct

SEQ ID NO: 137 - DNA, 1637 bp, Homo sapiens
  misc_feature: Incyte ID No: 256043.19
gggcggtgccggccgaacccagacccgaggttttagaagcagagtcaggcgaactgggccagaaccgcgacctccgcaaccttgagcggcatccgtggagtgcgcctgcgcagctacgaccgcagcaggaaagcgccgccggccaggcccagctgtggccggacagggactggaagagaggacgcggtcgagtaggtgtgcaccagccctggcaacgagagcgtctaccccgaactctgctggccttgaggtggggaagccggggagggcagttgaggaccccgcggaggcgcgtgactggttgagcgggcaggccagcctccgagccgggtggacacaggttttaaaacatgaatcctacactcatccttgctgccttttgcctgggaattgcctcagctactctaacatttgatcacagtttagaggcacagtggaccaagtggaaggcgatgcacaacagattatacggcatgaatgaagaaggatggaggagagcagtgtgggagaagaacatgaagatgattgaactgcacaatcaggaatacagggaagggaaacacagcttcacaatggccatgaacgcctttggagacatgaccagtgaagaattcaggcaggtgatgaatggctttcaaaaccgtaagcccaggaaggggaaagtgttccaggaacctctgttttatgaggcccccagatctgtggattggagagagaaaggctacgtgactcctgtgaagaatcagggtcagtgtggttcttgttgggcttttagtgctactggtgctcttgaaggacagatgttccggaaaactgggaggcttatctcactgagtgagcagaatctggtagactgctctgggcctcaaggcaatgaaggctgcaatggtggcctaatggattatgctttccagtatgttcaggataatggaggcctggactctgaggaatcctatccatatgaggcaacagaagaatcctgtaagtacaatcccaagtattctgttgctaatgacaccggctttgtggacatccctaagcaggagaaggccctgatgaaggcagttgcaactgtggggcccatttctgttgctattgatgcaggtcatgagtccttcctgttctataaagaaggcatttattttgagccagactgtagcagtgaagacatggatcatggtgtgctggtggttggctacggatttgaaagcacagaatcagataacaataaatattggctggtgaagaacagctggggtgaagaatggggcatgggtggctacgtaaagatggccaaagaccggagaaaccattgtggaattgcctcagcagccagctaccccactgtgtgagctggtggacggtgatgaggaaggacttgactggggatggcgcatgcatgggaggaattcatcttcagtctaccagcccccgctgtgtcggatacacactcgaatcattgaagatccgagtgtgatttgaattctgtgatattttcacactggtaaatgttacctctattttaattactgctataaataggtttatattattgattcacttactgactttgcattttcgtttttaaaaggatgtataaatttttacctgtttaaataaaatttaatttcaaatgc

SEQ ID NO: 138 - DNA, 8249 bp, Homo sapiens
  misc_feature: Incyte ID No: 445012.6
  unsure 4150-4244, 8100-8103, 8105, 8107, 8109-8110, 8115, 8120, 8127, 8131,8137, 8150, 8155, 8157, 8180: a, t, c, g, or other
gaagggatgacgaggccctgagcaccgatccatgcccacgcctgtgggatgaaagctgatatgaggaggcccaggggacctgagggagtcggctccctctgctacctcctgtctcttgagtatcctgtgatcgtgacctgtccattcccaccagtgcaggggtccatgagcccccaaagccttagccccgtgggccccacggagtgagcggcatgcagcacccccgggcctgtccagtgtcctctggcctgctgccctgcacccccagaaggccctgacgccctggggcacttctgctctgcacaggaccacgcgggggtttgccatggtgacataaaggggcgcggaggaaggaaggagcgtgaccagcctgtggactgcgcccctggctgggaggaaggactgggggcccagatcctccactcccagtgccccacaagggcgtcgcttcctaagtctctgtgaatttgttggtcagtggacgattctcgtgtctcctcctgtgtggggccttggggtagccagggcaggccgggcctccggtggccaaggtctcggaggccaggatgcctgccctggcatgcctccggaggctgtgtcggcacgtgtccccgcaggctgtccttttcctgctgttcatcttctgcctgttcagcgttttcatctcggcctactacctatatggctggaagcgaggcctggagccctcggcggatgcccccgagcctgactgcggggacccgccgcctgtggcccccagtcgcctgctgccactcaagcctgtgcaggcagccaccccttcccgcacagacccgttggtgctggtctttgtggagagcctctactcgcaactgggccaggaggtggtggccatcctggagtccagccgcttcaaataccgcacagagattgcgccgggcaagggtgacatgcccacgctcactgacaagggccgtggccgcttcgccctcatcatctatgagaacatcctcaagtatgtcaacctggacgcctggaaccgggagctgctggacaagtactgtgtggcctacggcgtgggcatcattggcttcttcaaggccaatgagaacagcctgctgagtgcgcagctcaagggcttccccctgttcctgcactcaaacctgggcctgaaggactgcagcatcaaccccaagtccccgctgctctacgtgacgcgacctagcgaggtggagaaaggtgtgctccccggcgaggactggacggttttccagtcaaatcactccacctatgagccagtgctgctggccaagacgcgctcgtctgagtccatcccacacctgggcgcagacgccggcctgcatgctgcactgcacgccactgtggtccaggacctgggcctgcacgacggcatccagcgcgtgctgtttggcaacaacctgaacttctggctgcacaagcttgtcttcgtggatgccgtggccttcctcacggggaagcgcctctccctgccattggaccgctacatcctggtggacattgatgacatcttcgtgggcaaggagggcacacgcatgaaggtggaggacgtgaaggccctgtttgacacacagaacgaactacgcgcacacatcccaaacttcaccttcaacctgggctactcagggaaattcttccacacaggtaccaatgctgaggacgctggggatgatctgctgctgtcgtatgtgaaggagttctggtggttcccccacatgtggagccacatgcagccccaccttttccacaaccagtccgtgttggccgagcagatggccttgaacaagaagttcgctgtcgagcatggcattcccacagacatggggtatgcagtggcgccccaccactcgggcgtgtaccccgtgcacgtgcagctgtacgaggcttggaagcaggtgtggagcatccgcgtgaccagcacggaggagtacccccacctgaagccagcccgctaccgccgtggcttcatccacaatggcatcatggttctcccacggcagacctgcggcctcttcacacacaccatcttctacaacgagtaccctggcggctccagtgagctggacaagatcatcaacgggggcgagctcttcctcaccgtgctcctcaatcctatcagcatcttcatgacgcacctgtccaactatgggaatgaccgcctgggcctgtacaccttcaagcacctggtgcgcttcctgcactcctggaccaacctccggctgcagacactgccccctgtgcagttggcgcagaagtacttccagatcttctccgaggagaaggacccgctctggcaggacccctgcgaggacaaacgtcacaaagacatctggtccaaggagaagacgtgtgaccgcttcccaaagctcctcatcatcggcccccagaaaacaggcaccactgccctctacctgttcctgggcatgcaccctgacctaagcagcaactaccccagctctgagacctttgaggagatccagttttttaatggccacaactatcacaaaggcatcgactggtacatggagttcttccccatcccttccaacaccacctccgacttctactttgagaaaagcgccaactactttgattcagaagtggcgccccggcgggcagcagccctcttgcccaaagccaaggtcctgaccatcctcatcaaccccgcggaccgggcctattcctggtaccagcaccagcgagcccatgacgacccagtggccctaaagtacaccttccatgaggtgattaccgccggctctgacgcatcctcgaagctgcgtgccctccagaaccgctgcctggtccctggctggtacgccacccacatcgagcgctggctcagtgcctatcacgccaaccagattctggtcttggatggcaaactgcttcgcacagaacctgccaaagtgatggacatggtgcagaagttccttggggtgaccaacaccattgactaccacaaaaccttggcgtttgatccaaagaaaggattttggtgccaactgcttgaaggaggaaaaaccaagtgtctgggcaaaagcaagggccggaaatatcccgagatggacttggattcccgagccttcctgaaggactattaccgggaccacaacatcgagctctccaagctgctgtataagatgggccagacacttcccacttggctacgagaggacctccagaacaccaggtagccgtggccaccacagccagactgaacgtttgtgaaagctgggacatcccaccacacgctgagccagacctgcagagtgggaagctggaccagggcagctgcgcacttatgagcaatactctgtggaggtctggtggggctgggggagcacccaggcggatctgcaagcacctcggagcacccaccgctgggtctgcggcctaagggacctccctcgccagcagaggtccattccgttcccagctgctcctggggaggccgcttcctggtaggagggagtccacgagactcttttctgtccctcactgtgttccgccgactgtcccctctcgtcacccatcactccctgcttccgcagggcgcccctcagtattcgctgccatatgtccctgtcctccaggctgtaggggaggagagcctggccgggggagacagactggacatttccctgtttcgagccaggctcttccaaggggccagctgggtccccggagtcagtcctaggctggatgggagggtggccccctcaagaggactcccagcctccacatctggttcctaccttcacatctcaccctcccgttctggggaagaatttctggttcctacagtatccactccatcctcaaggcttcccgcagggccttggggcactgccttgccatcgggcccagttctccgggccccacctgcacccctttcttccccctgggatatgatgtgtggtgtttcctgtggtaaaagactgaggcaggccaggggtctgccagtaacatgttcccatgtacagacacggtccccacaccctcccagcctcaggcccaggcagacatgggcgagctggtgagactgccagccacggctttgcttagccacctgtggccgagggctctcagagacccccttaacctcccaaatactaagaagctaaaatannnnnnnnnnnnnnnnnnnnnnnnnnnnnnnnnnnnnnnnnnnnnnnnnnnnnnnnnnnnnnnnnnnnnnnnnnnnnnnnnnnnnnnnnnnnnnnatgtgtatatatatatattctattttttttggttgggttcgtttttaattcagtcctacaaaatggtggtaagccccagtctcaggggtcaccctgtcttagagctagagatgaggtggcagggagggaggctgtgtcctcagtggcctggggctgagcagaccttaggaaggggccctccccagtgccgtggctgctctggggctaccccaggtgaacagaggtggtgagatgcgcagggaagaccagctctctccaggacatcgggctgcgtgaagtccagtgaccctgaggggattttggccaaaggaaacagccagggctgggctaggagagctggggtcaaaagctgccccacccactctccctcacatggtgctaggctgggagctgccctgagagctgggatgcccaccaaggcccacagaactgtctccaggcccttgtagacagtgggatctctgggctgatttctggttggggtctgctcctaccccaccccatttaacaatgtgaagtgactgaggctggggtgcctctccctggccccctccaactgccaaattctgcttccctctgaaccccaggaaatactttctggagaggcttgtcttgttcagaagactctagcatcttggggctggaaggtcctttgacgggtatgaaacaggtccagaaaggggaggtggcctgcttggccgacgtcatggagccagctgggagcagggctgagcgttgaacccgaggctcccggttccaagtcccatcgtgctcctcttccaatgccacactgcctctgagcccatccttgggaccctactctgtgccaggttcctgtcccttcctccgtcacagcatggtcattccaggatatggggacaaaccactccttcccagccagggtgcctttgagccttctcattccgaggtctgcgtttgcatccctgtcgtgttctccctcgaggggtccttccccagcctgtgggggcctgggtctgttctgagctgattcccttttctccagttctctgctgggatgaagaaagttggacactcagtgggaccagctgcaggtggtttcactgtgtacacagcagtgtccccatcatgcctctcaatggggcctgcaagcctgggaacttgggcatcgttgggccagcaggatgagcagcaaagggtctgaggacagggtggcatgtctgcttgtgtgctcatgaagacatgcccacgccatggagccaggggcttacagagaggggcagtgacttccagagtcccatccgtcagtgaggggactgggctgcgggatgggtgaggatcttacagctcccaggttcggaaatctaccctctaggcctggaggcctctctcgcagagcatggaaggcaggagaggtgggctggcctagggcaggagctccacttctctctgcctctggctatgggaaggagcaggcggttggaaatcctgtgacagcagagatcttctggatttttgcctggacccttctgcaagcctggagactggacctgccacatgttccaagtctgtctgcctaggtcactgctgccacttctcctcccactaacagacctttcttgaagacccactaggtccagacactgccgggacttgcaggtatggggggtagaaggagaggcagataagctgcctggggggctgttagctaatgggtacaaggacaccccctcccgagaagagaagccacagatgagtgggccagcgaggccagtcttcaatgtccactaattcactctaagcatttggccaaaaaaaggagagagaaataactgaaattgttcaggtggctccatcgtctattctgtggtcccctccatgagcctttgccccagggtgggtgcaggtgcgagtgtcacctgcagctgcctcagtcattcagagttccagagccttctgtggtggagcatcctgctgcttggaggatgagtctgaagtttaaaaatgggccttttctgagcccccctgatgagcagtcagtgcttctgggcccagctaaggaagccatctgttcccagcagaggagagctgctgcgctgacctgcagaggttggtggtcccagcacagagctgtgcccatgggcttgttagtgggaaaagcaaatacaacaatgttttaccaaacatttaattatgaatgcccactccccagcatctagatctaaaattattaacattttgccacattctttttctctctctgtgtatgtatatgttttctctgtcctaatttaaaagtacattgcaaacatcatgaaacttgatccctgaaagcttcagcctgcatctcctaagagttagggcattgtcctacacattggcccagtatcacagccaagacgagaagtcatttcccagcgatgtctgctatctaatctgtattcaaatccccccaattgtctcccaggtaacttatgtgtctggttttggaatcagcatccagtcacggtgcacacattgcattttctaactatgtttttaaaacctctttgaatgctgaaaggtcttccctcagctcactttgagtttttaaatgacattgtttttgaggccctaggcctgctgtctttttgaagccccacattctgaatttgtcagattgtttgctcatggtgtcgcataaccacttcttctatcccctgtactttcaaggataatttaggctacatgagattttgccttttgtgctgacttgacagcttcacttctgcctaagatgcgcctccactgtcacctgtaccaagtgccaaaacagcagaggggccagttagagcaagagctctgggggggccggaaagtctccctggagaaggccgtaatatctgggccttggaaggaaggacacagggctctggaaggaggaggctgcatgcctgaaggctgggccttcgaccctggggatgggccacagggcaccaaacacatcatatgtctctctctttctattttggggtcccagggttttcatttcctggagacccgtggtctgtgtgcactggagcagagccaggctctcagttgcagcagggaaaagcctacatggggaactgcctcccgcaagctgtggtgtgagaagagccctggctggcagcaggagctgtgaagtttcatcccagccgggtgcatttagtagctgcctgaccatcttcctcccaggccctcagtttcttcatctgtagaatgagcagataggggccacagcagggattttcacacatcaaaggaggcagcctctgctctagttgatgtgaggatgagggggcggcctagaccccctgctgcccaggccgttgaggcaacactgggttcctggcttgacagctgtgggctggctgcccttgccagctcagacggctggcgagttttcagcttccctaagggactggcatagggttttgtggggtcaatgccaggaacctgggggaaactggatgcgttttatcctaagaagttcatccctcctgctcttactgtttccggccctggaggagaatgagggaggagagggttttctatgactgtgttagcttttattattagcaagagggctccttttgtaatttgtgcatgaaattcatgtcatttcctgggagaggagagggccgactggagagggtggggggcacactggggaagcaggcagaggtttccttcccttgtaggggggtggggagagtggggagagggggtgctatccagttcgcctgatgagggctctcgaaccagccgttttgggttgtgttaaaggtgagaccttcctccattaatgtacaatctcgaactaactgctaataaagtggggttctgtttgtaaaannnnanancnnaacanggaantgccaangccnctatancaccctactacgnctaancnggctcaattcctgcctgaatagnactgaagagcagtcactcgaggcactgctagaacagtcactggggcaatattttcaccagtgtcctctg

SEQ ID NO: 139 - DNA, 1248 bp, Homo sapiens
  misc_feature: Incyte ID No: g463906
caagatatcgaattccaaatttgagggcctcccggctctggcgccggagggagagctcaggccgccatgcgcgacaggacccacgagctgagacagggggatgacagctcggacgaagaggacaaggagcgggtcgcgctggtggtgcacccgggcacggcacggctggggagcccggacgaggagttcttccacaaggtccggacaattcgtcagactattgtcaaactggggaataaagtccaggagttggagaaacagcaggtcaccatcctggccacgccccttcccgaggagagcatgaagcaggagctgcagaacctgcgcgatgagatcaaacagctggggagggagatccgcctgcagctgaaggccatagagccccagaaggaggaagctgatgagaactataactccgtcaacacaagaatgagaaaaacccagcatggggtcctgtcccagcaattcgtggagctcatcaacaagtgcaattcaatgcagtccgaataccgggagaagaacgtggagcggattcggaggcagctgaagatcaccaatgctggcatggtgtctgatgaggagttggatcagatgctggacagtgggcaaagcgaggtgtttgtgtccaatatccttaaggacacgcaggtgactcgacaggccttaaatgagatctcggcccggcacagtgagatccagcagcttgaacgcagtattcgtgagctgcacgacatattcacttttctggctaccgaagtggagatgcagggggagatgatcaatcggattgagaagaacatcctgagctcagcggactacgtggaacgtgggcaggagcacgtcaagacggccctggagaaccagaagaaggtgaggaagaagaaagtcttgattgccatctgtgtgtccatcaccgtcgtcctcctagcagtcatcattggcgtcacagtggttggataatgtcgcacattgttggcactaggagcaccaggaacccagggcctggccttctctcccagcagcctggggggcaggcagagcctccagtcggaccccttcctcacacactggcccctatgcagaagggcagacagttcttctggggttggcagctgctcattcatgatggcctcctccttcaggcctcaatgcctgggggaggcctgcactgtcctgattggccgggacacacggttttgtaaaaaattaaaaaacaaaaaaagagcatagaaaaaaaaaaaaccgagt

SEQ ID NO: 140 - DNA, 3737 bp, Homo sapiens
  misc_feature: Incyte ID No: 475621.1
ctcccgagctgcgctaggcgggcgccacggctgcccggcgaaggaaaccgaaaccgagtccgggcccgtccctccgcggccccatccgcccggtgcacccggggtcgcgctcgccaggccgcggagcccagagctgcgcgcacgaaccgtgcgccgggagggcgtgggcgtggcgccgaagggtcccgagtcttcgacgcctctgcggcggctcctccctccttgcagttggatccctggcgggtgcggcccggcccgggcccgtgagcggcgcacagaatgggccgatgctgcttctacacggcggggacgttgtccctgctcctgctggtgaccagcgtcacgctgctggtggcccgggtcttccagaaggctgtagaccagagtatcgagaagaaaattgtgttaaggaatggtactgaggcatttgactcctgggagaagccccctctgcctgtgtatactcagttctatttcttcaatgtcaccaatccagaggagatcctcagaggggagacccctcgggtggaagaagtggggccatacacctacagggaactcagaaacaaagcaaatattcaatttggagataatggaacaacaatatctgctgttagcaacaaggcctatgtttttgaacgagaccaatctgttggagaccctaaaattgacttaattagaacattaaatattcctgtattgactgtcatagagtggtcccaggtgcacttcctcagggagatcatcgaggccatgttgaaagcctatcagcagaagctctttgtgactcacacagttgacgaattgctctggggctacaaagatgaaatcttgtcccttatccatgttttcaggcccgatatctctccctattttgggcctattctatgagaaaaatgggactaatgatggagactatgtttttctaactggagaagacagttaccttaactttacaaaaattgtggaatggaatgggaaaacgtcacttgactggtggataacagacaagtgcaatatgattaatggaacagatggagattcttttcacccactaataaccaaagatgaggtcctttatgtcttcccatctgacttttgcaggtcagtgtatattactttcagtgactatgagagtgtacagggactgcctgcctttcggtataaagttcctgcagaaatattagccaatacgtcagacaatgccggcttctgtatacctgagggaaactgcctgggctcaggagttctgaatgtcagcatctgcaagaatggtgcacccatcattatgtctttcccacacttttaccaagcagatgagaggtttgtttctgccatagaaggcatgcacccaaatcaggaagaccatgagacatttgtggacattaatcctttgactggaataatcctaaaagcagccaagaggttccaaatcaacatttatgtcaaaaaattagatgactttgttgaaacgggagacattagaaccatggttttcccagtgatgtacctcaatgagagtgttcacattgataaagagacggcgagtcgactgaagtctatgattaacactactttgatcatcaccaacataccctacatcatcatggcgctgggtgtgttctttggtttggtttttacctggcttgcatgcaaaggacagggatccatggatgagggaacagcggatgaaagagcacccctcattcgaacctaaacattgcctttgcttggtgaagaaactgtgtgagctgtcctgacctggacgatgacgtggggaaaccctccacctccttgcaggcttgttgcctgttgaaagaaggaaaaagacacggcgctggcaagtgataggaacattctggccagaggttaaagagcaggctgacatggctggccattaagctttataaaatcatgtgggctctgaaattgttcttttatgtgtctagcaagtatttaataaacccttgtatagtaattttgttgttgttgggtgctggtagctccagaattttgtgaccactattgtgggtaaaatgtctctgcatcacttgttaatgctactggtctaacttcattcagtatgcttcattcaccgaactttgtgctcaaaatgcgtatataccattttatgttgtattcctccatttcacttgcaaaacagaagtaaataagagttcgggacccagggtaaaatggtagcttcatccaatatatcattcaaatgcatctgatttctaaaacatattacattttatgctgatcttcagttcataattcttccaggaaaactcagtcttccaactgcaataaaatactgggtagaatcaaatgggaaaggggttgggtggggcaatacccatgagttgatagtgataagctcctaaggatttttaacttgtacttttgtgaacgaagagaatgcataaataatgttggtgaggataaagtacagatatttcatgtagaattaattgctagttatgatgcttgtggatagttaactgttttttttttagtcaaaatgatcatgctacgaaaagatgcttctgagagaatgtaatgagtaactgatttttcttcctgagtcgcccttgccaaatatgttactgtattaattaatctaatattgagtgattatttgtaaaattatgaatatgggaaatccatctatctacagcctaagttacacataagtttcagaaagtctgattagactaaagagatatttcttctgggacagccttcttcttggtaattttgaagttctttttacaagttccttcctcagtttcagttctttccagtgttttgtagctcactgtcactcactgaatagagaaacgtgtgccctatacttcctgtgacaatcattttgctgacagaatgatggatgtttaaaatattgcacaaagtactttaaagaaaggtctgttaggaccagaagcagagacaccacttttcaaaggacttcttggtttcagcataacctaagacagggaattgggagccatcatatgtcacagtgttcagaattcaagcatatttaagggcattttctttgattctcaaagttcagcattcattttgaattgagaagcctatacatttagctgacaaagtgcttatagaatttcttaacaactgaaccattcaaaaggattttttttgtttaaaactggatttcaatgtaagcaaatgaagaaaaaaatatagatttcatttccatagcttcttatccctgtattgaggtaataaattgttttactgacaatttttcctttttctacactaaaacaatatgtgatatatttcccctcttgaagaggcaattcattaaactctcaaattttctatagaatcaagatagaacctttagatactccaactcaccaaaatgtaaaaaaactaacaaaaatatttggtcttcaataatgctaaatatctacatttttagaatttatcaacatttaactagataattgggcatgtcttaattatgcatgtacttatccatactaataaaattgacaatgctagtgcatacttattggtttagtcctattatcaggatataatcatctgtgaggaggatattttaaatactgtaaatgataacagttaatgatatacacatttagactgagttgcacactggcagggagaccaaaaacattacttccatacttgtgtcatgattcttttttttttgagagagtctcactctgtcgccaggc

SEQ ID NO: 141 - DNA, 4193 bp, Homo sapiens
  misc_feature: Incyte ID No: 216063.17
  unsure 1626-1649: a, t, c, g, or other
tgcgcgcgcgcggccctccctgctccttcgcaccagcccccaaaccaacttgtccccatcaactccatctttctagtccccaccttccccggtgcagacacccggcgaagccacccggttttcccagcggcatttccgatgacagcttcggggctacgtgtcctgtgctgtcggagacgcacaggaagcaaagtttgtgagaagccttgggggcgactttgccttgggcacccgcatttgtgcgtctgcgaggtgcctcggtgtgcgcggagctagtttcccagtttcccgggcccctcccttctccgagcccctctagcgatttgtttaggaaaagtgatgacatgaactagtagtggagaatcgcagcgccgctccccgccctggggagggaggggagccccggagagcctgccggtgggagctggaagcaggctcccggctgagcgccccagcccgaaaggcagggtctgggtgcgggaagagggctcggagctgccttcctgctgccttggggccgcccagatgagggaacagcccgatttgcctggttctgattctccaggctgtcgtggttgtggaatgcaaacgccagcacataatggaaacaggacctgaagacccttccagcatgccagaggaaagttcccccaggcggaccccgcagagcattccctaccaggacctccctcacctggtcaatgcagacggacagtacctcttctgcaggtactgggaaacccacaggcacacccaaggccctcatctttgtgtcccatggagccggagagcacagtggccgctatgaagagctggctcggatgctgatggggctggacctgctggtgttcgcccacgaccatgttggccacggacagagcgaaggggagaggatggtagtgtctgacttccacgttttcgtcagggatgtgttgcagcatgtggattccatgcagaaagactaccctgggcttcctgtcttccttctgggccactccatgggaggcgccatcgccatcctcacggccgcagagaggccgggccacttcgccggcatggtactcatttcgcctctggttcttgccaatcctgaatctgcaacaactttcaaggtccttgctgcgaaagtgctcaaccttgtgctgccaaacttgtccctcgggcccatcgactccagcgtgctctctcggaataagacagaggtcgacatttataactcagaccccctgatctgccgggcagggctgaaggtgtgcttcggcatccaactgctgaatgccgtctcacgggtggagcgcgccctccccaagctgactgtgcccttcctgctgctccagggctctgccgatcgcctatgtgacagcaaaggggcctacctgctcatggagttagccaagagccaggacaagactctcaagatttatgaaggtgcctaccatgttctccacaaggagcttcctgaagtcaccaactccgtcttccatgaaataaacatgtgggtctctcaaaggacagccacggcaggaactgcgtccccaccctgaatgcattggccggtgcccggctcatggtctgggggatgcaggcaggggaagggcagagatggcttctcagatatggcttgcnnnnnnnnnnnnnnnnnnnnnnnnttggagaaatccttaacacaattttctaaaaaataacagacatttttgttatacattagactatcagacactggacctaccttaatggttagacactttatgcaaaaaaagagaaaggtcccaggtgattttccacaaagaatgtgctaaaatgtccactgaaaacaaagccaagcctctgccctgcctctcccagctcccacaagggttccaggaattcctggtgttcccaggacaccagactgcaataactggaggcgcctccttcctgcccacccttcgctcacgccccagcgccctctctgaccagcctccgcttggtggccttcctctggccgtgtgatgaggtggttgctgtctccataggggccagctccccagggcagactcacgtgcccctctgaggctcagaaaatgcccagcccttcctcaaaatgagcagccacccatgactttgtgggctccttgttagcctgagaccaggctttgcagaggggcggggggtgaggcttagcccagaaggagaactgagcaggaaaccaaggctcttctctgtcccctgcccttcccctcctgccagggggaggctcaggttggtccccgagtgccgcctgtactcacaaaggctgcctttcctctagagtcactaattttacctgatgctatgagagaatcatattgaagatgaaatgtctaatatataatgtatattttaaagcagagactattttggtggataggtgggagggagcaaggggagtttgagggaatcagagcttgatgctactgtacagaactggacaggttgggccggcagtggtggggccagagggctctgtgctctaggagctaagccagcagcccccgagaggggacttggctgggcctttcctatgggcaaggcccagtgctcttcctgcccaccagggaccatggagcagtggcaccctatggggctatgatccctaggcctgggcctgggcctgcctgtggcccagagctaccctgggagtgtcagtgctagcagcacagctacctctggtggcaggagaagagaggcccagcacagcagcaggccaggccttcctgtccaggtctgcatggagcactcggtgacccagagcagggactggaggcacccccagccctgccccaggccacagcaggacaggccgggacaggcctcacccaaggccaaggctggcatcagccaatcattcagagctgaggccctgggcctagcctgcccttctcaggtgccaataccaccccagccctgcccttggcctcactttttcccagcaataagtggggttcaccacccgcctcgggaatactttccccttctaaatgggacttgctgttacctcaggaggctccttagtgcaaatatgaccctggtcagggctttgccaccgttgaagccctgcagaaggtgcaatgtaggggttctggggccacagaggagaggccacttcccaccaggacccccaacatgaagtctaggcctcaggggctcccgcccttcttcctccagcagcgggaactgccactgctctcccaggccctgttctggaggctaaccttggttcctggagagtgtgcccctccaccctccctccagcagccctgatcacaccatgagagccaggaacgggtcaccctgctgaagatcactctgtgccctgggggaggagccaagccctcaccccacaaggggcaggtgggggcttggttgctgacccggcccaagtccccacagagcaccttctgtagctccagcttgtctccctggcttctctttgaaggagaaaaatgtaaaatatgcactgagaaagccagccccgcctgcttagtcagccccggcagcagggcagccatgggaactcaggaaaagcaggaaccctttccaaaagcccagagatgccctgggctcagatctgtaattctcccaggagctgtgatagagcaggccacacaaagtccctacgcctccctgctgcctcccccagatgcatgtgatggcatcaccattccccaaattgaatatcagcatgcggcctgaccagggactctttagatgcatgaatttatttatatgaaggctctcacagagacacacacagcacttcagtagcatttgcattcctggttaaagaatcaccaatatttaaaataaaaactttcctgaaattgggactgtcatgttatccaagcaccaccgtcaacacagcccagtccatacagcttccctccacttccaggtggtgctgggctcaccaagggagcactggtgggtgctctgaaaacccacaggatcccacctccaggcccacctgggtcccatctcactctcttcttctttcaccaattgctaacatagaccttgttgggatcacgatggctcacaagccagctgttgggttgctatgtcactgtggctcagtcacatcctgcgtgtatactgtctgcggggcacatatgtatccatttagagctaaaggaatcagtgtacactacagctaatccctaataaatcccgat

SEQ ID NO: 142 - DNA, 750 bp, Homo sapiens
  misc_feature: Incyte ID No: 1099498.9
gctaagggaagtgcccgggaccccacctgaccccaacgctcacgggacaggggcagaggagaaaaacgtgggtggacagagggaggcaggcggtcaggggaaggctcaggaggagggagatcaacatcaacctgccccgccccctccccagcctgataaaggtcctgcgggcaggacaggacctcccaaccaagccctccagcaaggattcagagtgcccctccggcctcgccatgaggctcttcctgtcgctcccggtcctggtggtggttctgtcgatcgtcttggaaggcccagccccagcccaggggaccccagacgtctccagtgccttggataagctgaaggagtttggaaacacactggaggacaaggctcgggaactcatcagccgcatcaaacagagtgaactttctgccaagatgcgggagtggttttcagagacatttcagaaagtgaaggagaaactcaagattgactcatgaggacctgaagggtgacatcccaggaggggcctctgaaatttcccacaccccagcgcctgtgctgaggactccctccatgtggccccaggtgccaccaataaaaatcctacagaaaaaaaaaaaggaaagtaaggggagggggaaggtgagagggctgcaccaaaacccaatggagggaggacgggagaaaaaaaaaaaagggggcgcccccggaattattggccccttggacccggggatttattccggggcgggtacctggggg

SEQ ID NO: 143 - DNA, 1072 bp, Homo sapiens
  misc_feature: Incyte ID No: 1099076.1
aaagcagccgccggcgccgggtgcctcacagcacgctgccacgccgacgcagacccctctctgcacgccagcccgcccgcacccaccatgggccacagttcagcagctggaaggaagatggcgcctggtggacagcaaaggctttgatgaatacatgaaggagctaggagtgggaatagctttgcgaaaaatgggcgcaatggccaagccagattgtatcatcacttgtgatggtaaaaacctcaccataaaaactgagagcactttgaaaacaacacagttttcttgtaccctgggagagaagtttgaagaaaccacagctgatggcagaaaaactcagactgtctgcaactttacagatggtgcattggttcagcatcaggagtgggatgggaaggaaagcacaataacaagaaaattgaaagatgggaaattagtggtggagtgtgtcatgaacaatgtcacctgtactcggatctatgaaaaagtagaataaaaattccatcatcactttggacaggagttaattaagagaatgaccaagctcagttcaatgagcaaatctccatactgtttctttcttttttttttcattactgtgttcaattatctttatcataaacattttacatgcagctatttcaaagtgtgttggattaattaggatcatccctttggttaataaataaatgtgtttgtgctaatatatcttgtatgcattctttaaaccttacaggaaattagtgatgagttttaataattattaattgagtaaaggttggggcagtcttgagggtacgtatattgagatgacactctagcaatttatatagatagctactcttacaggaaatactgtaccaattatttaagcttgccctatactatttgaactttgtatgaattcaggaatcttgaatttctggcagagaccattctcaataaaaggtgactacaacataaactttattattcaaattagagcaaaggtttaattaaccagcattgactaaaatactttttgtgtgtatttatatacaaatataagtaatactatgtatggaataaccag

SEQ ID NO: 144 - DNA, 862 bp, Homo sapiens
  misc_feature: Incyte ID No: 902119.3
cccggagccgcggcgggagaggaacgcgcagccagccttgggaagcccaggcccggcagccatggcggtggaaggaggaatgaaatgtgtgaagttcttgctctacgtcctcctgctggccttttgcgcctgtgcagtgggactgattgccgtgggtgtcggggcacagcttgtcctgagtcagaccataatccagggggctacccctggctctctgttgccagtggtcatcatcgcagtgggtgtcttcctcttcctggtggcttttgtgggctgctgcggggcctgcaaggagaactattgtcttatgatcacgtttgccatctttctgtctcttatcatgttggtggaggtggccgcagccattgctggctatgtgtttagagataaggtgatgtcagagtttaataacaacttccggcagcagatggagaattacccgaaaaacaaccacactgcttcgatcctggacaggatgcaggcagattttaagtgctgtggggctgctaactacacagattgggagaaaatcccttccatgtcgaagaaccgagtccccgactcctgctgcattaatgttactgtgggctgtgggattaatttcaacgagaaggcgatccataaggagggctgtgtggagaagattgggggctggctgaggaaaaatgtgctggtggtagctgcagcagcccttggaattgcttttgtcgaggttttgggaattgtctttgcctgctgcctcgtgaagagtatcagaagtggctacgaggtgatgtaggggtctggtctcctcagcctcctcatctgggggagtggaatagtatcctccaggtttttcaattaaacggattatttttttcag

SEQ ID NO: 145 - DNA, 4340 bp, Homo sapiens
  misc_feature: Incyte ID No: g2982500
ccccacgccaccccaagcatcccaggactcttctgaaacagggcagtgacccgggaggaagtcaccaggtgcagaggaccgtgccctgtggggacctgcctgcaggctgctgacagactccgggctaccagatcggccgtccagctggaatcaaccgatggaggctccgctgcaaactggaatggtgcttggcgtgatgatcggggccggagtggcggtggtggtcacggccgtgctcatcctcctggtggtgcggaggctgcgagtgccaaaaaccccagccccggatggcccccggtatcggttccggaagagggacaaagtgctcttctatggccggaagattatgcggaaggtgtcacaatccacctcctccctcgtggatacctctgtctccgccacctcccggccacgcatgaggaagaaactgaagatgctcaacattgccaagaagatcctgcgcatccagaaagagacgcccacgctgcagcggaaggagcccccgcccgcagtgctagaagctgacctgaccgagggcgacctggctaactcccatctgccctctgaagtgctttatatgctcaagaacgtccgggtgctgggccacttcgagaagccactcttcctggagctctgccgccacatggtcttccagcggctgggccagggtgactacgtcttccggccgggccagccagatgccagcatctacgtggtgcaggacgggctgctggagctctgtctgccagggcctgacgggaaggagtgtgtggtgaaggaagtggttcctggggacagcgtcaacagccttctcagcatcctggatgtcatcaccggtcaccagcatccccagcggaccgtgtctgcccgggcggcccgggactccacggtgctgcgcctgccggtggaagcattctccgcggtcttcaccaagtacccggagagcttggtgcgggtcgtgcagatcatcatggtgcggctgcagcgagtcaccttcctggcactgcacaactacctgggtctgaccaatgagctcttcagccacgagatccagcccctgcgtctgttccccagccccggcctcccaactcgcaccagccctgtgcggggctccaagagaatggtcagcacctcagctacagacgagcccagggagaccccagggcggccacccgatcccaccggggccccgctgcctggacctacaggggaccctgtgaagcccacatccctggaaaccccctcggcccctctgctgagccgctgcgtctccatgccaggggacatctcaggcttgcagggtggcccccgctccgacttcgacatggcctatgagcgtggccggatctccgtgtccctgcaggaagaggcctccggggggtccctggcagcccccgctcggacccccactcaggagcctcgtgagcagccggcaggcgcctgtgaatacagctactgtgaggatgagtcggccactggtggctgccctttcgggccctaccagggccgccagaccagcagcatcttcgaggcagcaaagcaggagctggccaagctgatgcggattgaggacccctccctcctgaacagcagagtcttgctgcaccacgccaaagctggcaccatcattgcccgccagggagaccaggacgtgagcctgcacttcgtgctctggggctgcctgcacgtgtaccagcgcatgatcgacaaggcggaggacgtgtgcctgttcgtagcgcagcccggggaactggtggggcagctggcggtgctcactggcgaacctctcatcttcacactgcgagcccaacgcgactgcaccttcctgcggatctccaagtccgacttctatgagatcatgcgcgcacagcccagtgtggtgctgagtgcggcgcacacggtggcagccaggatgtcgcccttcgtgcgccagatggacttcgccatcgactggactgcagtggaggcgggacgcgcgctgtacaggcagggcgaccgctccgactgcacttacatcgtgctcaatgggcggctgcgtagcgtgatccagcgaggcagtggcaagaaggagctggtgggcgagtacggccgcggcgacctcatcggcgtggtggaggcactgacccggcagccgcgagccacgacggtgcacgcggtgcgcgacacggagctagccaagcttcccgagggcaccttgggtcacatcaaacgccggtacccgcaggtcgtgacccgccttatccacctactgagccagaaaattctagggaatttgcagcagctgcaaggacccttcccagcaggctctgggttgggtgtgcccccacactcggaactcaccaacccagccagcaacctggcaactgtggcaatcctgcctgtgtgtgctgaggtccccatggtggccttcacgctggagctgcagcacgccctgcaggccatcggtccgacgctactccttaacagtgacatcatccgggcacgcctgggggcctccgcactggatagcatccaagagttccggctgtcagggtggctggcccagcaggaggatgcacaccgtatcgtactctaccagacggacgcctcgctgacgccctggaccgtgcgctgcctgcgacaggccgactgcatcctcattgtgggcctgggggaccaggagcctaccctcggccagctggagcagatgctggagaacacggctgtgcgcgcccttaagcagctagtcctgctccaccgagaggagggtgcgggccccacgcgcaccgtggagtggctaaatatgcgcagctggtgctcggggcacctgcacctgcgctgtccgcgccgcctcttttcgcgccgcagccctgccaagctgcatgagctctacgagaaggttttctccaggcgcgcggaccggcacagcgacttctcccgcttggcgagggtgctcacggggaacaccattgcccttgtgctaggcgggggcggggccaggggctgctcgcacatcggagtactaaaggcattagaggaggcgggggtccccgtggacctggtgggcggcacgtccattggctctttcatcggagcgttgtacgcggaggagcgcagcgccagccgcacgaagcagcgggcccgggagtgggccaagagcatgacttcggtgctggaacctgtgttggacctcacgtacccagtcacctccatgttcactgggtctgcctttaaccgcagcatccatcgggtcttccaggataagcagattgaggacctgtggctgccttacttcaacgtgaccacagatatcaccgcctcagccatgcgagtccacaaagatggctccctgtggcggtacgtgcgcgccagcatgacgctgtcgggctacctgcccccgctgtgcgaccccaaggacgggcacctactcatggatggcggctacatcaacaatctgccagcggacatcgcccgcagcatgggtgccaaaacggtcatcgccattgacgtggggagccaggatgagacggacctcagcacctacggggacagcctgtccggctggtggctgctgtggaagcggctgaatccctgggctgacaaggtaaaggttccagacatggctgaaatccagtcccgcctggcctacgtgtcctgtgtgcggcagctagaggttgtcaagtccagctcctactgcgagtacctgcgcccgcccatcgactgcttcaagaccatggactttgggaagttcgaccagatctatgatgtgggctaccagtacgggaaggcggtgtttggaggctggagccgtggcaacgtcattgagaaaatgctcacagaccggcggtctacagaccttaatgagagccgccgtgcagacgtgcttgccttcccaagctctggcttcactgacttggcagagattgtgtcccggattgagccccccacgagctatgtctctgatggctgtgctgacggagaggagtcagattgtctgacagagtatgaggaggacgccggacccgactgctcgagggatgaaggggggtcccccgagggcgcaagtcccagcactgcctccgagatggaggaggagaagtcgattctccggcaacgacgctgtctgccccaggagccgcccggctcagccacagatgcctgaggacctcgacaggggtcaccccctccctcccacccctggactgggctgggggtggccccgtgggggtagctcactccccctcctgctgctatgcctgtgacccccgcggcccacacactggactgacctgccctgagcggggatgcagtgttgcactgatgacttgaccagcccctcccccaataaactcgcctcttgg

SEQ ID NO: 146 - DNA, 1146 bp, Homo sapiens
  misc_feature: Incyte ID No: 1097580.4
  unsure 24, 38: a, t, c, g, or other
gagcctccggcaccggccgcgcantggaggcggcgganggaagcccagactctagccccctcccccttcccaacagccttgacttcatctcagctccagagcccgccctctcttcctgcagccgggaacttcagccggctggagccccaccatggctgcaatccgaaagaagctggtgatcgttggggatggtgcctgtgggaagacctgcctcctcatcgtcttcagcaaggatcagtttccggaggtctacgtccctactgtctttgagaactatattgcggacattgaggtggacggcaagcaggtggagctggctctgtgggacacagcagggcaggaagactatgatcgactgcggcctctctcctacccggacactgatgtcatcctcatgtgcttctccatcgacagccctgacagcctggaaaacattcctgagaagtggaccccagaggtgaagcacttctgccccaacgtgcccatcatcctggtggggaataagaaggacctgaggcaagacgagcacaccaggagagagctggccaagatgaagcaggagcccgttcggtctgaggaaggccgggacatggcgaaccggatcagtgcctttggctaccttgagtgctcagccaagaccaaggagggagtgcgggaggtgtttgagatggccactcgggctggcctccaggtccgcaagaacaagcgtcggaggggctgtcccattctctgagatccccaaggcctttcctacatgccccctcccttcacaggggtacagaaattatccccctacaaccccagcctcctgagggctccatgctgaaggctcccattttcagttccctcctgcccaggactgcattgttttctagccccgaggtggtggcacgggccctccctcccagcgctctgggagccacgcctatgccctgcccttcctcagggcccctggggatcttgccccctttgaccttccccaaaggatggtcacacaccagcactttatacacttctggctcacaggaaagtgtctgcagtaggggacccagagtcccaggcccctggagttgttttcggcaggggccttgtctctcactgcatttggtcaggggggcatgaataaaggctacaggctccaacgtg

SEQ ID NO: 147 - DNA, 909 bp, Homo sapiens
  misc_feature: Incyte ID No: 391851.1
gccgccctagccacgtcccctcgcagttcggcggtcccgcgggtctgtctcttgcttcaacagtgtttggacggaacagatccggggactctcttccagcctccgaccgccctccgatttcctctccgcttgcaacctccgggaccatcttctcggccatctcctgcttctgggacctgccagcaccgtttttgtggttagctccttcttgccaaccaaccatgagctcccagattcgtcagaattattccaccgacgtggaggcagccgtcaacagcctggtcaatttgtacctgcaggcctcctacacctacctctctctgggcttctatttcgaccgcgatgatgtggctctggaaggcgtgagccacttcttccgcgaactggccgaggagaagcgcgagggctacgagcgtctcctgaagatgcaaaaccagcgtggcggccgcgctctcttccaggacatcaagaagccagctgaagatgagtggggtaaaaccccagacgccatgaaagctgccatggccctggagaaaaagctgaaccaggcccttttggatcttcatgccctgggttctgcccgcacggacccccatctctgtgacttcctggagactcacttcctagatgaggaagtgaagcttatcaagaagatgggtgaccacctgaccaacctccacaggctgggtggcccggaggctgggctgggcgagtatctcttcgaaaggctcactctcaagcacgactaagagccttctgagcccagcgacttctgaagggccccttgcaaagtaatagggcttctgcctaagcctctccctccagccaataggcagctttcttaactatcctaacaagccttggaccaaatggaaataaagctttttgatgcaaaaaaaaaaaaaaagg

SEQ ID NO: 148 - DNA, 1410 bp, Homo sapiens
  misc_feature: Incyte ID No: 013105.9
  unsure 448-516: a, t, c, g, or other
tctcatggttggaagttgacggggcatacccaatttttggaaaagtacactttattggttaaaatgtcattataattagcaaatgactatacaaaatggcattcttgtattcaatattcaatattattttgtgcttgaatgaatcacccagttagttttctgaccaaaacacaatcctttttaaaaaatttgtttacaatttcagtatgttatgtagttacagatgagtaagtcagagaattaatttcacaatgaagtaattaacactttcaaaggactgtactttaaaatttcaaagtgtgatgttttctattggtgtagaatgagcctaaataaggagtaaaaagacacgagccctactccttgatctgccaatgacagatgactttgggccaccatgttatctctctgagcctcagtttccttatggtgagaacacagtagtctnnnnnnnnnnnnnnnnnnnnnnnnnnnnnnnnnnnnnnnnnnnnnnnnnnnnnnnnnnnnnnnnnnnnnaatttttcgctccatgatgcgttatctgggtctggaaacccaaaccctcaaggatggcctggcgcatgggggaaccagcctgctggggcagggggctacccaggggcttcctatcctggggcctaccccgggcaggcacccccaggggcttatcctggacaggcacctccaggcgcctaccatggagcacctggagcttatcccggagcacctgcacctggagtctacccagggccacccagcggccctggggcctacccatcttctggacagccaagtgcccccggagcctaccctgccactggcccctatggcgcccctgctgggccactgattgtgccttataacctgcctttgcctgggggagtggtgcctcgcatgctgataacaattctgggcacggtgaagcccaatgcaaacagaattgctttagatttccaaagagggaatgatgttgccttccactttaacccacgcttcaatgagaacaacaggagagtcattgtttgcaatacaaagctggataataactggggaagggaagaaagacagtcggttttcccatttgaaagtgggaaaccattcaaaatacaagtactggttgaacctgaccacttcaaggttgcagtgaatgatgctcacttgttgcagtacaatcatcgggttaaaaaactcaatgaaatcagcaaactgggaatttctggtgacatagacctcaccagtgcttcatataccatgatataatctgaaaggggcagattaaaaaaaaaaaaagaatctaaaccttacatgtgtaaaggtttcatgttcactgtgagtgaaaatttttacattcatcaatatccctcttgtaagtcatctacttaataaatattacagtgaattacctgtctc

SEQ ID NO: 149 - DNA, 7319 bp, Homo sapiens
  misc_feature: Incyte ID No: 356248.4
  unsure 4844, 7302: a, t, c, g, or other
acgactgcctgctgttcgaggccggcacggtggccacgctggctccagaagaaaaggaagtcattaaaggacagtatggcaagctcacggacgcgtacggctgcctgggggagctgaggctgaaatctggtggcacgtctctgagcttcctggtgttggtgacaggctgcacatctgtgggcagaattccagatgctgaaatctacaaaatcactgccactgacttttaccctcttcaggaagaggccaaggaggaggaacgcctcatagctttgaagaaaatcctcagctcgggggtgttctatttctcatggccaaacgatgggtctcgctttgacctgactgtccgcacgcagaagcagggggatgacagctctgaatgggggaactccttcttctggaaccagctgttgcacgtgcccttgaggcagcaccaggtgagctgctgtgactggctgctgaagatcatctgcggggtggtcaccatccgcaccgtgtatgcctcccacaagcaggccaaggcctgcctcgtctctcgcgttagctgtgagcgcacaggcactcgcttccacacccgtggcgtgaacgacgacggccatgtgtccaacttcgtggagacagagcagatgatttacatggacgatggagtgtcatcttttgtccagatcagaggctccgttccgctgttctgggaacagccagggcttcaggttggctcccatcatctgagactccacagaggcctggaagccaatgcccctgctttcgacaggcacatggtgcttctgaaggagcagtacgggcagcaggtggtcgtgaaccttctgggaagcagaggcggagaggaggtgctcaacagagccttcaagaagctgctctgggcttcttgccacgcgggcgacacgcctatgatcaattttgacttccatcagtttgccaaaggtgggaagctagagaaattggagaccctcttgaggccacagttaaagctgcactgggaagacttcgatgtgttcacaaagggggagaacgtcagtccacggtgaggctcgctgcgcactgtgccgcgtcttctgctggggggaagcgtcagtccacgttttcagaaaggcactttgcggatgaactgtcttgactgcctggaccgaaccaacactgtgcagagcttcatcgcgctcgaggtcctgcatctgcagctcaagaccctggggctgagttcaaaacccatcgttgaccgctttgtggagtccttcaaagccatgtggtctctgaatggccacagcctgagcaaggtgttcacaggcagcagagccctggaagggaaggccaaggtggggaagctgaaggatggagcccggtccatgtctcgaaccatccagtccaacttcttcgacggggtgaagcaggaggccatcaagctgctgctggttggggacgtctacggcgaggaggtggcagacaaagggggcatgctgctggacagcacggcgctcctggtgactcccaggatcctgaaagctatgactgagcgtcagtccgaattcacaaatttcaagcggatccggattgctatggggacctggaacgtgaacggaggaaagcagttccggagcaacgtgctcaggacggcggagctgacagactggctgctcgactcgccccagctctcgggagctaccgactcccaggatgacagcagcccagctgacatatttgctgtggggtttgaagagatggtggaattgagcgcagggaatattgtcaatgccagtactaccaacaagaagatgtggggtgaacagcttcagaaagccatctcacgctctcatagatacattctgttgacttcggcacagctggtgggcgtctgtctttatatctttgtacgtccataccatgtcccgttcatcagggacgtagccatcgacacagtgaagacgggcatggggggcaaggcggggaacaagggcgccgtcggcatccgcttccagttccacagcaccagcttctgcttcatatgtagtcacctgacggccgggcagtcccaggtgaaggagcggaatgaagactacaaggagatcacccagaaactctgcttcccaatggggagaaatgttttttctcatgattatgtattttggtgtggcgatttcaactaccgcattgatcttacttatgaagaagtcttctattttgttaaacgccaagactggaagaaacttctggaatttgatcaactacagctacagaaatcaagtggaaaaatttttaaggactttcacgaaggagccattaactttggacccacctacaagtatgacgttggctcagccgcctacgatacaagcgacaaatgccgcacccccgcctggacagacagggtgctgtggtggaggaagaaacatccctttgataaaacagctggagaactcaaccttctagacagtgatctagatgttgacaccaaagtcagacacacctggtctcctggtgccctgcagtattatggtcgtgcggagctacaagcgtctgatcacagacctgtgctggcgatcgtggaggtggaagttcaggaagtcgatgtgggtgctcgggagagggttttccaggaagtgtcctccttccagggccccctggatgccactgttgtagtaaaccttcaatcaccgaccttagaagagaaaaacgagtttccagaggacctgcgtactgagctcatgcagaccttggggagttatgggacaattgttcttgtcaggatcaaccaagggcagatgctggtaacttttgcagacagtcactcggctctcagtgtcctggacgtggacggtatgaaggtgaaaggcagagcagtgaagattagaccgaagaccaaggactggctgaaaggtttgcgagaggagatcattcggaaacgagacagcatggcccccgtgtctcccactgccaactcctgtttgctggaggaaaactttgacttcacaagtttggactatgagtcagaaggggatattcttgaagacgatgaagactacttggtggatgaattcaatcagcctggggtctcggacagtgaactcgggggagacgacctctctgatgtccccggccccacagcactggctcctcccagcaagtcacctgctctcaccaaaaagaagcagcatccaacgtacaaagatgacgcggacctggtggagctcaagcgggagctggaagccgtcggggagttccgccaccgttctccgagcaggtctctgtcggtccccaaccggcctcggccacctcaacccccgcagagacccccccctccaaccggtttaatggtgaaaaagtcggcttcagatgcgtccatctcctccggcacccatgggcagtattcaattttgcagacggcaagacttctaccaggagcacctcagcaacctcccaaggctcggactggaataagtaaaccttataatgtcaagcagatcaaaaccaccaatgcccaggaggcagaagcagcaatccggtgtctcctggaagccagaggaggtgcctccgaagaagccctaagtgccgtggccccaagggaccttgaagcatcctctgaaccagagcccacaccgggggcagccaaaccagagaccccacaggcgcccccactccttccccgtcggcccccacccagagttcctgccatcaagaagccaaccttgagaaggacaggaaagcccctgtcaccggaagaacagtttgagcaacagactgtccattttacaatcgggcccccggagacaagcgttgaggcccctcctgtcgtgacagcccctcgagtccctcctgttcccaaaccaagaacatttcagcctgggaaagctgcagagaggccaagccacaggaagccagcatcagacgaagcccctcctggggcaggagcctctgtgccaccacctctggaggcgccgcctcttgtgcccaaggtacccccgaggaggaagaagtcagcccccgcagccttccacctgcaggtcctgcagagcaacagccagcttctccagggcctcacttacaatagcagtgacagcccctctgggcacccacctgccgcgggcaccgtcttcccacaaggggactttctcagcacttcatctgctacaagccccgacagcgatggcaccaaagcgatgaagccagaggcagccccacttcttggtgattatcaggaccccttctggaaccttcttcaccaccctaaactgttgaataacacttggctttctaagagctcagaccctttggactcaggaaccaggagccccaaaagagatcccatagacccagtgtcagctggcgcttcagctgccaaggcagagctgccaccagatcatggacacaaaaccttaggtcactgggtgacaatcagtgaccaagaaaagaggacagcactgcaggtgtttgacccactggcaaaaacatgactgagcagctttgaaggctgcagtcctatagaatgcataccttcctccctctaggcatccctccaccagaagagacatctatttaaaggcacactggccaaaacgtttgtgcatctgtcactctcgtgtagtttacaaaaatcgtgtctcttattcagtaagatggttactcagccaccaaaatatatttcactcaaggcttgtacatctgaagtttgctcttcaaggaatgggaaccttcctgttaaattcggtgtatggattttaagaaaggaatctagccaatgaggtccaagaagttctcacccattgaatttttaaatggctgttcagttcatgttgtacgtgatggagatttgtcttttcttttatttgcatttnacagatttggtataacattttggggagccacctgaaggttgatgtataaagtaaggattagagaaagaggtcgttgtgaccattagtagctgtcctggcccacttaaacaaggttacaaaaaatcagagtcggaagcagccaaataggtcaacctaatgactagactgtacattcccatgagccttcatgtttaagtgtgtacatgtgcgttaaccttgatgatgcgtgaatcccgagggagccggtggcatacaccgttagcttaaccttagcttaaactagctgaaggctcctgtgccatgtcttagacattgcatgccctatcaattactataatcctgagccatggtgtgctactgaaaccaatttttatccaccatctagtccttattaaatgaaacctcacggatcctttgttccgcttatattccatgcataccacataaaagcacacagtgcgaaaactcttgctgatacgcgatattgattctcattgttagaatatggagagtgtttcagcctcgtctgtccggctggagcttcgggatggaaagtgctatgtgtccctgcatataagaatcaccaggccagtgtttctgggtttgcttgtctatatgtttgtctatattttttgcctatacatttttcccacgtttccaacagcacttctcacctattcaataactgaaaaagacattaccatagtgctttacatttttaaagtaatgttacaaggtctggaatccatttggagcagataccgtgttttcgctatttaataagaagttcagtagtgaaatcttactgtaccgcctgttgtatctgggagcctcgtacagaggctcgcacagcagtgatcaagtgtcatcccttacgtgactgggggatgtctgtcctaaaagctgactgctaggatagtaaggatcatcttgcctgggctatgccactgtcttgttaccaattagacatctggaatttcataattagttttcattgtcactgtcaagatatattgcagattacttaaatatggccatcaaaacaaaagttacaacacgtatctcttttcatctgaaaactaatacctggaaaaggataaaaaaaaaaaaggaatccgtgacccacagagctagacagataagatgcatagttgaccagtcataaaaggcggtgtttaggtgatcaggatgccgttggtggcatttacgtgctttatatgatttttacctccgtaacaaacacaagaaataaacagaatggtccttaacagagtttgggggagagagcaagatgggttccttggagaagctgatttgccaagatgcacatcgctattaacagccagagtcataaatgaaatgaaattgaagaattcattcaaatgctcttttccctataacctcttttctcaccaaaaaggagataaatttgaaaacagataaatgtaacaaccagtcaaagaagcaggggaaaagtaagctcctccaaagttgcttgcagtgctggaaatagatctcatttttaggttttctcttcgttccagataccaaataaatgggacagagaataaaatttttgttaaaatatgtgctcatctcctaagtagctcttcagagtctgaccgtaaggtaaaaacacacagaattgtgttgactgggggaggtgaatcacaaaaaagttacgaggagtttaagagttaaatattatttgatcgtggctgtcaaatttagtgaacaacatagattggatttggagttggtagtaggtatggttctcataccagaattctcttaaaaaaaaaaaaaaggacaattggaattgccttatttatttttaaaatcaatgcttactagttggtaggattcccaggtcagcagcagggttgattaaataatcttgacaatgagcagctgccatcttgggggatttcattctgtggttttttaaatgtttcgtctttgatgctaccatccagggcttcttattgtgaccttgtagcctattttgttcctgctgttctctaacatggtgcagttcacgcagactggtttaggtacttcacaactcaccattgtctctctgaccccaagcctagtcccttttacatcaccatcttctcagacttcttgcctattcttaaaatatgttttggttaatgattgaattaggacatcagcttaagcaattcctgtaacggtttaacgttgttgaagttcaaggcacataataaaattctccctgatgtgtgtgtaagtataaacaaagtaatgtatcaaagcgttcactttataatgaagtcatttcattgggaaggaaagctgcaaagattattgggggactagtgattaataaaatcctgtaatatttttgaagtgaaaatttgtactgaaattgtacatgatacctattaaatgtttttgtctttttttaaattgggtttatttcttttcagatatngaagagaacttagaata

SEQ ID NO: 150 - DNA, 5729 bp, Homo sapiens
  misc_feature: Incyte ID No: 331045.1
atgaggagggacgagcgagacgccaaagccatgcggtccctgcagccgccggatggggccggctcgccccccgagagtctgaggaacggctacgtgaagagctgcgtgagccccttgcggcaggaccctccgcgcggcttcttcttccacctctgccgcttctgcaacgtggagctgcggccgccgccggcctctccccagcagccgcggcgctgctcccccttctgccgggcgcgcctctcgctgggcgacctggctgcctttgtcctcgccctgctgctgggagcggaacccgagagctgggctgccggggccgcctggctgcggacgctgctgagcgtgtgttcgcacagcttgagccccctcttcagcatcgcctgtgccttcttcttcctcacctgcttcctcacccggaccaagcggggacccggcccgggccggagctgcggctcctggtggctgctggcgctgcccgcctgctgttacctgggggacttcttggtgtggcagtggtggtcttggccttggggggatggcgacgcagggtccgcggccccgcacacgcccccggaggcggcagcgggcaggttgctgctggtgctgagctgcgtagggctgctgctgacgctcgcgcacccgctgcggctccggcactgcgttctggtgctgctcctggccagcttcgtctggtgggtctccttcaccagcctcgggtcgctgccctccgccctcaggccgctgctctccggcctggtggggggcgctggctgcctgctggccctggggttggatcacttctttcaaatcagggaagcgcctcttcatcctcgactgtccagtgccgccgaagaaaaagtgcctgtgatccgaccccggaggaggtccagctgcgtgtcgttaggagaaactgcagccagttactatggcagttgcaaaatattcaggagaccgtcgttgccttgtatttccagagaacagatgattctttgggattgggacttaaaacaatggtataagcctcattatcaaaattctggaggtggaaatggagttgatctttcagtgctaaatgaggctcgcaatatggtgtcagatcttctgactgatccaagccttccaccacaagtcatttcctctctacggagtattagtagcttaatgggtgctttctcaggttcctgtaggccaaagattaatcctctcacaccatttcctggattttacccctgttctgaaatagaggacccagctgagaaaggggatagaaaacttaacaagggactaaataggaatagtttgccaactccacagctgaggagaagctcaggaacttcaggattgctacctgttgaacagtcttcaaggtgggatcgtaataatggcaaaagacctcaccaagaatttggcatttcaagtcaaggatgctatctaaatgggccttttaattcaaatctactgactatcccgaagcaaaggtcatcttctgtatcactgactcaccatgtaggtctcagaagagctggtgttttgtccagtctgagtcctgtgaattcttccaaccatggaccagtgtctactggctctctaactaatcgatcacccatagaatttcctgatactgctgattttcttaataagccaagcgttatcttgcagagatctctgggcaatgcacctaatactccagatttttatcagcaacttagaaattctgatagcaatctgtgtaacagctgtggacatcaaatgctgaaatatgtttcaacatctgaatcagatggtacagattgctgcagtggaaaatcaggtgaagaagaaaacattttctcgaaagaatcattcaaacttatggaaactcaacaagaagaggaaacagagaagaaagacagcagaaaattatttcaggaaggtgataagtggctaacagaagaggcacagagtgaacagcaaacaaatattgaacaggaagtatcactggacctgattttagtagaagagtatgactcattaatagaaaagatgagcaactggaattttccaatttttgaacttgtagaaaagatgggagagaaatcaggaaggattctcagtcaggttatgtataccttatttcaagacactggtttattggaaatatttaaaattcccactcaacaatttatgaactattttcgtgcattagaaaatggctatcgagacattccttatcacaatcgtatacatgccacagatgtgctacatgcagtttggtatctgacaacacggccagttcctggcttacagcagatccacaatggttgtggaacaggaaatgaaacagattctgatggtagaattaaccatgggcgaattgcttatatttcttcgaagagctgctctaatcctgatgagagttatggctgcctgtcttcaaacattcctgcattagaattgatggctctatacgtggcagctgccatgcatgattatgatcacccagggaggacaaatgcatttctagtggctacaaatgcccctcaggcagttttatacaatgacagatctgttctggaaaatcatcatgctgcgtcagcttggaatctatatctttctcgcccagaatacaacttccttcttcatcttgatcatgtggaattcaagcgctttcgttttttagtcattgaagcaatccttgctacggatcttaaaaagcattttgattttctcgcagaattcaatgccaaggccaaatgatgtaaatagtaatggcatagaatggagtaatgaaaatgatcgcctcttggtatgccaggtgtgcatcaaactggcagatataaatggcccagcaaaagttcgagacttgcatttgaaatggacagaaggcattgtcaatgaattttatgagcagggagatgaagaagcaaatcttggtctgcccatcagtccattcatggatcgttcttctcctcaactagcaaaactccaagaatcttttatcacccacatagtgggtcccctgtgtaactcctatgatgctgctggtttgctaccaggtcagtggttagaagcagaagaggataatgatactgaaagtggtgatgatgaagacggtgaagaattagatacagaagatgaagaaatggaaaacaatctaaatccaaaaccaccaagaaggaaaagcagacggcgaatattttgtcagctaatgcaccacctcactgaaaaccacaagatatggaaggaaatcgtagaggaagaagaaaaatgtaaagctgatgggaataaactgcaggtggagaattcctccttacctcaagcagatgagattcaggtaattgaagaggcagatgaagaggaatagcgacagtttgagtaaaagaaaagtcatattgaagaagcccagagggttgtgcccaggggcagaaatcattgcctagtgttcaccggctgactctcaactgaccattcccatgtggacaggccttaatactgtgagaggatccttgctctgctggcagtttcccactcctatgcactttcacaggaactagaaaactattcttaaaccaaaaataccatccgtgttgacccatgttgcagagcccttacttaaatccttcactggtgtatgaatactttgtcataatgctgctttgctgggtagtgagctcttatttttcactgggggtcagctataactaaaaactcaagtgacatatttcagttaccaaagtggccaggaactttttgcttttatgaaaatagattcatattgtatttcccagtgtgtcttttatgtctttgaatgttttggagaaaagtctatgcctgtctaaaaatgaatccagtgttgcctttctgagggatttctgctcaatgcaatacactgttcagtgctattctcccagctaggtttatccatgaaggactgagtgacctttgttgtatttaacaaaatccaggtgcatcaatttctgatgctttttactattgtgtattatctactatgtgtgttttatttctgctgagagtattcaggtttgccatggacatcagaagtttgaattccagtcttatcttatgttccatggctgaattttaaagctgtttaggtttaacaatgaagggatttattctttagtcaaaattgttgtttttactctagctcaggattcgtatttttaaagatttagttaatataaacacagcacagatttgtcagaagaaaaaaaatttgctgtaataccaaaactaacctcatcaaagatacagaaaaaaagaaatatagtgagccctaaaggacacatacattgaataaataattggaacatgtggttatctttagatccacatcttagctgtcatttgttcactctaaaactgatgttcatctttctgttaatttccctctgcctaaagactacatgacagaaatgacctatcactacttattatttctgaagcctaactggcaagactgatttctgagaacaagtaaagaactggaatacttatttttcatataaaaatctaaatgtgttaataaatcatttcatacaaaagtacattattaaataaccacattattaaaataattgcaagaaaatggaccatatttacaatgttttgtaaacttgctagtgtgtggatatgtaccctacttgtgaaatacatttgaagatataaagagcagccaaaatgatggcaaaatggtaggctaatattttctattattattggagaacatatcatattttggaatcatgcaattttgcacacagtgaaaccattaattttccaaggtaattcctttagaatatggtattggcatgcagtttcttacttatctagaatatttggcttatctgaaagatatcaatttaagatctctggaagtgttagaatttttgatccttcacagtgtcaatatttaatgaatcactaagctttatttattagacgtgttgagtgagtgctgagttccttgctgccacttttgttaccattgtcacacactatgtgtaaaccagtcccaccacttattactaataaaattttgactgataatttatatttgcacttacaatatatatatcctgtccttatatttctctagagtacattttccatcatgtttaagtgtatttctgctattatttcctctcctgcagaatacatacaagtgtatgtgtataaagtcatacatgtacaagcatgcatattgagattgaatcacatttccatactgtctgttattttattgggttttatattgggtttctttagtttatgttggttttctcaaaagcagcattttaaattacgaatactggacttattggatttaattataaatccaattactactggaaactcatttttacataatatagtccttaaattatttaacccttgctaagtaattgacatatgtaacaataactagcctaaagaaacccaaaaaagtatctctcccgagctgaaacttaaaaattcgtaagtgtaagaaagaatgtgagaatatattaaatgcacactgtaccattagatgaaatcttacttgagaaattgccataagccatattacagatcttactttgattgttactgaatcagattaatttcttgttataataattttcatcataaattttctatttttaaagccgctggtactagaaatattcttttaatgctatatctatgtacctactgacacatttttctccataaaagtacttttaaaaatt

SEQ ID NO: 151 - DNA, 6094 bp, Homo sapiens
  misc_feature: Incyte ID No: 482480.3
gaattcccttttctgggcaccgccttctgctagggggttgtagatgaaagtgcctgctcccagagaagcttgtctaacctagcacagtttctaagctacccaggctgccagaccgagcgaccgtgctgccatggacacagactctcagcgttctcatctctcttccttcaccatgaagctgatggacaaattccactcacccaaaatcaagagaacgccatcaaagaagggaaaaccagctgaggtgtccgtaaagattccagagaagcctgtgaacaaagaggcaacagacagatttctaccagagggctaccctctccccttggatctggagcagcaggcagtagaatttatgtccaccagtgctgtggcttccaggtctcaaaggcagaagaacctgagctggctggaggagaaagagaaggaagttgtcagtgccctgcgctactttaagaccattgtggacaaaatggcaattgataagaaggtactggagatgcttccagggtcagccagcaaggtgctggaggccatcttacccctggtgcagaacgatcctcgaattcagcacagctcagccctctcttcctgctatagccgagtgtaccaaagcctcgccaacctcattcgctggtctgaccaagtgatgctggaaggcgtgaactcagaagacaaggagatggtgacgactgtgaagggggtcatcaaggctgtgctggatggagtgaaggagctggtcaggctcaccatcgagaagcagggacgtccgtctccgacgagccccgtgaagcccagttcccctgccagcaagcctgatggcccagcagagctccccctgacagaccgcgaggtagagatcctaaacaagacgactgggatgtcacagtcaactgagctcctcccagatgccacggatgaagaggtcgcgccccccaagcctcctctgcctggcattcgggtggttgataatagtcctccaccagcattgccacccaagaaaagacagtcggcgccgtcccctacccgagtggctgtggtggcccccatgagccgagccaccagtggctccagtttgcctgttggaatcaataggcaggattttgatgttgactgttacgcacagaggcgactgtcaggaggcagccactcatatggtggagagtcgccccgcctctccccctgcagcagcataggcaagctcagcaagtcagacgagcagctgtcctctctggacagggacagtgggcagtgctcccggaacacaagctgtgaaacactagaccactatgatcccgactatgaattcctccagcaagacctctctaacgcagaccagatacctcagcagacggcctggaaccttagcccgttgccagagtctttgggggagtctgggtctccatttcttggccctcctttccagctgcctcttggcggccatccccagccagacggacctctggccccagggcagcagacagatacgccacctgctctccccgagaagaagcgcaggagcgcagcctcccagacggcggacggctctggctgcagggtgtcctacgagcggcatccctcgcagtatgacaacatctctggggaggacctgcagagcacagccccgatcccatccgtcccctacgcgccctttgctgctattctgccctttcagcatggaggttcctcagcccctgtcgaatttgtgggtgattttactgctcctgagtcaaccggtgacccagaaaaaccacctcctctaccagagaagaaaaacaaacacatgctggcctacatgcagttgctggaggactactcggagccgcagccctctatgttctaccagacgccacagaacgagcacatctaccagcagaagaacaagctcctcatggaggtatacggcttcagcgactccttcagtggggtggactccgtgcaggagctggccccgccgcccgccctaccccccaagcagcggcagctggagccaccggctgggaaagacggacatcccagagatccctcagcggtcagcggcgtccctgggaaggacagcagagacggcagtgagagggccccaaagtcaccagatgctctggagtcggctcagtcggaggaggaagtggacgagctgtccctcattgaccacaacgaaattatgtccaggctgacgctcaagcaggagggtgatgacgggccggacgtccgcggaggatctggggacatcttactggtccatgctactgagactgacaggaaagatttggtgttgtactgcgaggcattcctgaccacctacaggaccttcatctccccagaggagctcatcaagaagctgcagtacagatatgagaaattctctccctttgccgacacattcaagaagcgcgtcagcaagaacacgttcttcgtgctggtacgggtggtggatgagctctgcctggtggagttgacagaagagatcctgaagctgctgatggaactggtcttccgcctggtgtgcaatggggagctgagcctggcccgtgtgctccggaagaacatcctggacaaggtggaccagaagaagctactcaggtgtgccacctccagccagcccctggcagcccggggggtagcagccaggccggggaccttgcacgactttcacagccatgagatagcggagcagctaacgctgctggatgctgagctcttctataaaatagagattcctgaggttttgctttgggcaaaagagcagaatgaggagaagagccccaacttgacccagttcacggagcacttcaacaacatgtcctactgggtccggtccataatcatgttacaggaaaaggcccaggacagggaacggctgctcttgaagttcatcaagatcatgaagcattgcggaagctgaataacttcaactcctacttggccatcctctctgccctggactcggcgcccatccgcaggctggagtggcagaagcagacttcagagggcctggccgagtactgcacactgatcgacagctcgtcctccttccgagcctaccgggccgccctctcggaggtggaaccgccgtgcatcccgtacctgggggctgatcctgcaggacctgaccttcgttcacctgggaaacccagactacatcgacgggaaagtgaacttctccaagcggtggcagcagttcaacatcctcgacagcatgcgctgcttccagcaggcgcactatgacatgcggaggaacgacgacattataaacttcttcaatgacttcagtgaccacctggctgaggaggccctatgggaactgtctctgaaaattaaacccaggaacataacaaggagaaaaacagaccgggaagagaagacctaggagcagacgccgggatccaggagaatgctcgaggggcgcagagggcagctcccagaccggagaggaccttggacctgttaggcgcatggcaggagtcccggcctcggagccatgaggctggccagccctcagcggggccgggcgggagctggagcctgccagccgcttcctgcctccttcctctgtgggagcagacccgtgggcctcagggcagccagcaggcaggtcttgttgccaatttacaaaccggtggttttctggtttggttttgttttctgcttttacttccatctctcccctcttgaccttccacccactcccctccagggagagagcagcagagacctcatcagcagaccaaggaagtggtgggtgctccccctccctaagctccagggtccctgaatcttctgaaatctcaaatgagtggaggcctcctggggtggcctgtcctgcaggggccctggaatgggggcaagcagctgggtgggcagaatgcagagtagactcgggggaggatcctttcactttccgcttccccttctgatgcatggaggatggtgtgagcttttcagcaggcccggaaaggtacgcaggtgacgccttagcagccccgcagctggtgctctgccccgcggtactggcgccatcagggcctcccttgcccgcctgagagcagcagcagtctctgtcatcccgtcgccccttaccccccaccccaggccactgggcccctcccacaccacctggggagctgagaagaggaggctggagtaagggaggacttgatcatccaagaaatactttttattgctgggagtcttctgaacctcaccaaactgaggccagagctgagctcctgggggagttaattcagaggggagaggccagcacctccctcctccattgctcgctgtgtgccttaaactccatctcatgtccctccccatcccctggctttccctccctccttgccccatcctgggccagccagcagggctcctcctctggctcttcagacctttcagccagtgctgtcagtgcccctgggagggaagggcatccctgaggcacccgaatggtccctcagggtgcagggaggcagaagcctggccacagaggagcctcctaaggcagcagctgcagcaagcgcaccctctccccactctccccacgccagagcggcttccagagcagatgctgtttccatcctcctcgtcaaaaccattctcgctgctgagcttgacaatctgggcaaggcttgtggggcgcttgacaaacagaatctgccctgtgccgcctggttccgtggcctccagcatgagcctgcaggcagggcgctgcgggaacccagttgtgctgccccagcccatgcctccgggtctgctgtgcatgaatgagtgctcacttgtcccgggtttaggacgtggtcaagtgaacagcagggtctaactgtgcttacttagcccagttcaaacagaacaaaggaaaaatatagaaagcaacatctgttgatcatttaggtttttttttaaaccaccatgtcactttgagtccttcatgggtttttgaacagcatttatcaagaagaaaatgtgggctttttcccctctcccgtgttttgtttgtcctgtagatagagggaggaaagccgtgcagtggcaggcgggaccccctctggtggcgggaccccctcttgcggtggtcttgcggggccagccgggacctgtcactttattatttaaggagtgtgtgtgtagagtcgctggcttattaacagtattgtgtgtgggttgggtttttagtttgttccttctttttgaagtcccttcatttcaatccttgactctctctccccttcccttgcccagctctgttgaatgctgctgtgcgcgtgtgagggccgctctgcacacagggcccttgggttgtgtgaactgaaattctccctgtatttgtgagactcgcaggagtccccatctgtagcacaggcaatgccagtgccatgctgcagcctcagaaaccaggcctctcactccagcagcaggcagaaccgtgtctgtggtcgggtgctgtccacagctctgtctgccttgttcttgggcttgagctggatagaggtggggtctcttcaccttccctgaattcagaacagaccctgtgcctggccccagtgtgcccaggcaattccccaggccctcattgggagcccttggtgttctgagcagcagggcccaggcagcacatgagcagtgcccaggggctccctgcgtgaggacggcaaggtgcgatgtatgtctaacttattgatggcaggcagccccctgtgccccctaagcctggccctggttattgctgagctctgtgctcagtgctgcggcctggccgtggctcgtctgttcctttggggggcccgggcgggttgtgggaatcagtcttcacagacagacgtgagccaggcggaggactcgttccttgcagaggtcagtcctcacctgcaggtgtcggggtgggggggggcaaggaggggcaggcacacaccatgtctgacctgaacccgattctggggagcatcttcccgctccggccccacgacctccacagggttacattgtaatatatatgccccagctaacctgtctgatggtggcatcttcctgcagacatttcaaacatgtaacttttatatgaaaaaaaataaacacagatgaaagctgcccaatgccaaac

SEQ ID NO: 152 - DNA, 2341 bp, Homo sapiens
  misc_feature: Incyte ID No: 245099.8
gctgccaggtccgggacggtggcgctggcggttgctgtcagctgattcccggggttggtggcagcggcggtagcagcaatggactttctcctggggaacccgttcagctctccagtgggacagcgcatcgagaaagccacagatggctccctgcagagcgaggactgggccctcaacatggagatctgcgacatcatcaacgagacggaggaaggtcccaaagatgccctccgagcagtaaagaagagaatcgtggggaataagaacttccacgaggtgatgctggctctcacagtcttagaaacctgtgtcaagaactgcgggcaccgcttccacgtgctggtggccagccaggacttcgtggagagtgtgctggtgaggaccatcctgcccaagaacaacccacccaccatcgtgcatgacaaagtgctcaacctcatccagtcctgggctgacgcgttccgcagctcgcccgatctgacaggtgtggtcaccatctatgaggacctgcggaggaaaggcctggagttccccatgactgacctggacatgctgtcacccatccacacaccccagaggaccgtgttcaactcagagacacaatcaggacaggattctgtgggcactgactccagccagcaagaggactctggccagcatgctgcccctctgcccgccccgcccatactctccggtgacacgcccatagcaccaaccccggaacagattgggaagctgcgcagtgagctggagatggtgagtgggaacgtgagggtgatgtcggagatgctgacggagctggtgcccacccaggccgagcccgcagacctggagctgctgcaggagctcaaccgcacgtgccgagccatgcagcagcgggtcctggagctcatccctcagatcgccaatgagcagctgacagaggagctgctcatcgtcaatgacaatctcaacaatgtgttcctgcgccatgaacggtttgaacggttccgaacaggccagaccaccaaggccccaagtgaggccgagccggcagctgacctgatcgacatgggccctgacccagcagccaccggcaacctctcatcccagctggcaggaatgaacctgggctccagcagtgtgagagctggcctgcagtctctggaggcctctggtcgactggaagatgagtttgacatgtttgcgctgacacggggcagctcactggctgaccaacggaaagaggtaaaatacgaagccccccaagcaacagacggcctggctggagccctggacgcccggcagcagagcactggcgcgatcccagtcacccaggcctgcctcatggaggacatcgagcagtggctgtccactgacgtgggtaatgatgcggaagagcctaagggggtcaccagcgaagaatttgacaaattcctggaagaacgggccaaagccgcggaccgattgcccaacctctccagcccctcagctgaggggcccccgggtcccccatctggcccagcgccccggaagaagacccaggagaaagatgatgacatgctgtttgccttatgagtgtggggtctggcaccctgcagcccaggtccccactgctctcacacccttaggctgggacctccctccctcctctggtgttaaggctgctttgggggtggcttgttacccccttttcctcctctttgaagacggagctgccccagctgtggctgggggtgtggaggcagtgggatgaactgggggacaggtctgcgctgcagtgggatctggctgctctgcctcctttcccaccccagctgaccatgagactttgctgagaagtggaggccccaggacaggctggctggctggctggctgcttgacccagtgtgactctccttcactgagtgataccctgctccgggcccatgccccaaggagcccttcagagcccacactgccagtcgaggcctggctggaggctggccacagtggaaattctgccgagcctcttgtcccttccctgctctgctgcatggggccccatggctttggctggccactgagggtagggtgtggaggtgtggaggccccctgaggagctgcggcggcccaggtacgaagctgcaactctgcgcgcagtgggcgagatctcatcagccccaggctgcaggtgaggcttcaggggatgctggggccccactgcccctccgctgccttgccctccatccttcctctgttccttctggccgggcaccacagcactggggctcacctcttggttgatcctcttgtactgggagaggtgccttttgtatccccaattaaaggtagaaaaccaccctgctaagcagcattgtc

SEQ ID NO: 153 - DNA, 2020 bp, Homo sapiens
  misc_feature: Incyte ID No: 245481.2
gcggcggcagcggaggcggcggctccagccggcgcggcgcgaggctcggcggtgggatccggcgggcggtgctagctccgcgctccctgcctcgctcgctgccgggggcggtcggaaggcgcggcgcgaagcccgggtggcccgagggcgcgactctagccttgtcacctcatcttgcccccttggttttggaagtcctgaagagttggtctggaggacgaggaggacattgatgtgcttggtgtgtggccagtggtgaagagatggctgctcctgtcccgtgggcctgctgtgctgtgcttgccgccgccgccgcagttgtctacgcccagagacacagtccacaggaggcaccccatgtgcagtacgagcgcctgggctctgacgtgacactgccatgtgggacagcaaactgggatgctgcggtgacgtggcgggtaaatgggacagacctggcccctgacctgctcaacggctctcagctggtgctccatggcctggaactgggccacagtggcctctacgcctgcttccaccgtgactcctgggcacctgcgccaccaagtcctgctgcatgtgggcttgccgccgcgggagcctgtgctcagctgccgctccaacacttaccccaagggcttctactgcagctggcatctgcccacccccacctacattcccaacaccttcaatgtgactgtgctgcatggctccaaaattatggtctgtgagaaggacccagccctcaagaaccgctgccacattcgctacatgcacctgttctccaccatcaagtacaaggtctccataagtgtcagcaatgccctgggccacaatgccacagctatcacctttgacgagttcaccattgtgaagcctgatcctccagaaaatgtggtagcccggccagtgcccagcaaccctcgccggctggaggtgacgtggcagaccccctcgacctggcctgaccctgagtcttttcctctcaagttctttctgcgctaccgacccctcatcctggaccagtggcagcatgtggagctgtccgacggcacagcacacaccatcacagatgcctacgccgggaaggagtacattatccaggtggcagccaaggacaatgagattgggacatggagtgactggagcgtagccgcccacgctacgccctggactgaggaaccgcgacacctcaccacggaggcccaggctgcggagaccacgaccagcaccaccagctccctggcacccccacctaccacgaagatctgtgaccctggggagctgggcagcggcgggggaccctcggcacccttcttggtcagcgtccccatcactctggccctggctgccgctgccgccactgccagcagtctcttgatctgagcccggcaccccatgaggacatgcagagcacctgcagaggagcaggaggccggagctgagcctgcagaccccggtttctattttgcacacgggcaggaggaccttttgcattctcttcagacacaatttgtggagaccccggcgggcccgggcctgccgccccccagccctgccgcaccaagctggccctccttcctccctcaggggaggtgggccatgcagctaacccacccaccaaagaccccctcaccctggccccttgggctggaccctccaatgccagcgactcccaggagcccttgggggacgtgaggggagcctctcacatccgatttctcctcctgccccagcctcctgtctatcccagggtctctgttgccaccatcagattataagctcctgatgctgggggggcccagccatccccctccccccagcacccacaattttcagtcccctcccctctgccctgttttgtatacccctcccctgaccctgctcctatcccacagtatttaatgccctgtcagtcccttctagtctgactcaatggtaacttgctgtatttgaattttttatagatgtatatacagggtggggggagtgggcggttctcattaaacgtcaccatttcatg

SEQ ID NO: 154 - DNA, 3011 bp, Homo sapiens
  misc_feature: Incyte ID No: 225021.4
  unsure 2821-2851: a, t, c, g, or other
acggctgccacctctctagaggcacctggcggggagcctctcaacataagacagtgaccagtctggtgactcacagccggcacagccatgaactacccgctaacgctggaaatggacctcgagaacctggaggacctgttctgggaactggacagattggacaactataacgacacctccctggtggaaaatcatctctgccctgccacagaggggcccctcatggcctccttcaaggccgtgttcgtgcccgtggcctacagcctcatcttcctcctgggcgtgatcggcaacgtcctggtgctggtgatcctggagcggcaccggcagacacgcagttccacggagaccttcctgttccacctggccgtggccgacctcctgctggtcttcatcttgccctttgccgtggccgagggctctgtgggctgggtcctggggaccttcctctgcaaaactgtgattgccctgcacaaagtcaacttctactgcagcagcctgctcctggcctgcatcgccgtggaccgctacctggccattgtccacgccgtccatgcctaccgccaccgccgcctcctctccatccacatcacctgtgggaccatctggctggtgggcttcctccttgccttgccagagattctcttcgccaaagtcagccaaggccatcacaacaactccctgccacgttgcaccttctcccaagagaaccaagcagaaacgcatgcctggttcacctcccgattcctctaccatgtggcgggattcctgctgcccatgctggtgatgggctggtgctacgtgggggtagtgcacaggttgcgccaggcccagcggcgccctcagcggcagaaggcagtcagggtggccatcctggtgacaagcatcttcttcctctgctggtcaccctaccacatcgtcatcttcctggacaccctggcgaggctgaaggccgtggacaatacctgccaagctgaatggctctctccccgtggccatcaccatgtgtgagttcctgggcctggcccactgctgcctcaaccccatgctctacactttcgccggcgtgaagttccgcagtgacctgtcgcggctcctgaccaagctgggctgtaccggccctgcctccctgtgccagctcttccctagctggcgcaggagcagtctctctgagtcagagaatgccacctctctcaccacgttctaggtcccagtgtccccttttattgctgcttttccttggggcaggcagtgatgctggatgctccttccaacaggagctgggatcctaagggctcaccgtggctaagagtgtcctaggagtatcctcatttggggtagctagaggaaccaacccccatttctagaacatccctgccagctcttctgccggccctggggctaggctggagcccagggagcggaaagcagctcgaaggcacagtgaaggctgtccttacccatctgcacccccctgggctgagagaacctcacgcacctcccatcctaatcatccaatgctgaagaaacaacttctacttctgcccttgccaacggagagcgcctgcccctcccagaacacactccatcagcttaggggctgctgacctccacagcttcccctctctcctcctgcccacctgtcaaacaaagcccagaagctgagcaccaggggatgagtggaggttaaggctgaggaaaggccagctggcagcagagtgtggccttcggacaactcagtccctaaaaacacagacattctgccaggcccccaagcctgcagtcatcttgaccaagcaggaagctcagactggttgagttcaggtagctgcccctggctctgaccgaaacagcgctgggtccaccccatgtcaccggatcctgggtggtctgcaggcagggctgactctaggtgcccttggaggccagccagtgacctgaggaagcgtgaaggccgagaagcaagaaagaaacccgacagagggaagaaaagagctttcttcccgaacccccaaggagggagatggatcaatcaaacccggcggtcccctccgccaggcgagatggggtggggtggagaactcctagggtggctgggtccaggggatgggaggttgtgggcattgatggggaaggaggctggcttgtcccctcctcactcccttcccataagctatagacccgaggaaactcagagtcggaacggagaaaggtggactggaaggggcccgtgggagtcatctcaaccatcccctccgtggcatcaccttaggcagggaagtgtaagaaacacactgaggcagggaagtccccaggccccaggaagccgtgccctgcccccgtgaggatgtcactcagatggaaccgcaggaagctgctccgtgcttgtttgctcacctggggtgtgggaggcccgtccggcagttctgggtgctccctaccacctccccagcctttgatcaggtggggagtcagggacccctgcccttgtcccactcaagccaagcagccaagctccttgggaggccccactggggaaataacagctgtggctcacgtgagagtgtcttcacggcaggacaacgaggaagccctaagacgtcccttttttctctgagtatctcctcgcaagctgggtaatcgatgggggagtctgaagcagatgcaaagaggcaagaggctggattttgaattttctttttaataaaaaggcacctataaaacaggtcaatacagtacaggcagcacagagacccccggaacaagcctaaaaattgtttcaaaataaaaaccaagaagatgtcttcacatattgtatttnnnnnnnnnnnnnnnnnnnnnnnnnnnnnnnatggtacaaaatggctgggggtgtggccatggagactggaggggaggtgcactgactcagatgaactgttctcccccttctttgataagaagtaggtggcagcagcctctggaaaagtcagggccctggaggttacctggcccagggctactacagccac

SEQ ID NO: 155 - DNA, 899 bp, Homo sapiens
  misc_feature: Incyte ID No: 451767.28
gacaggagacggacaggggtcagatgaccctgatagggaagagagggtgctgacggtgttcagaatttcaaattttaattaaaatgaaaaaaaaatgtcaacttggaatgtcatgattttcttcaaacaagcaacgacaacaaaatagaagagattaaactattggcatatttaacagcattgaacagaattctgtgtcctgtaaaaaaattagcttatgtccccatgtgggtatatgcaaatgtgtatacaaacatatccccctaggtgagctaaacactattctggaaatagtatcctctacccaaatctacttggctatatctgtggatagtgtatggtgtgtgtatttatccaatttacataaaagaaagctcctggccaaatctaccaaagcgttttccattatgtaagaaagtagggattgtcacacatgggcagtcagatgtgatattttgccagaggaaaaaaaatgatgctggtcctgaaagttgtcatgcttcaaactcacaattgaggaaaggaatctgatagattcactgaaatcataataactcaaaagattagtacaattctaggctcatcaggaagttttagggatgttatgtatgatcttttatataaaatacggttttgtgtctacatgaaatgtcacatatgaatgttaaaaacgtagaagagtagggaatctttagggaaaggagagtaatggagggcctgggatgtggttttgtacactaatacactaaaaagagtatttcttagggtggagagatgaaaactgttaggaaatactattatgggccaagaattttgatgggaatggaacatgtgaatgtcactctgatcacttttatgtaaaaattataatttaattaataaaaaatttcttaagaagt

SEQ ID NO: 156 - DNA, 2430 bp, Homo sapiens
  misc_feature: Incyte ID No: 902142.11
tgatttcctcccctatttccctgcatttctcctctgtgctcattgccacatgcagctcagcctgggctacacagccaggtgtcagatgtgtctctgctgatctgagtctgcctgtggcatggacctgcatcttccctgaagcatctccagggctgaaaaatcactgaccatggcaccatggtctcatccatctgcacagctgcagccagtgggaggagacgccgtgagccctgccctcatggttctgctctgcctcgggctgagtctgggccccaggacccacgtgcaggcaggtgagtctgtccccagctgtcccaggtccctcctcctcaatggggacaaagggccacccatgggcagctggaggtgaagaccgcagttctgggtgattgatggggacgtctggagggtcctcgggctgagagctgggatctgaggggtggggaggtcttggagcccagactctgatttccttccagggaactccccaaacccaccctctgggctgagccaggctctgtgatcagctgggggaactctgtgaccatctggtgtcaggggaccctggaggctcgggagtaccgtctggataaagaggaaagcccagcaccctgggacagacagaacccactggagcccaagaacaaggccagattctccatcccatccatgacagaggactatgcagggagataccgctgttactatcgcagccctgtaggctggtcacagcccagtgaccccctggagctggtgatgacaggagcctacagtaaacccaccctttcagccctgccgagtcctcttgtgacctcaggaaagagcgtgaccctgctgtgtcagtcacggagcccaatggacacttttcttctgatcaaggagcgggcagcccatcccctactgcatctgagatcagagcacggagctcagcagcaccagggctgaattccccatgagtcctgtgacctcagtgcacggggggacctacaggtgcttcagctcacacggcttctcccactacctgctgtcacaccccagtgaccccctggagctcatagtctcaggatccttggagggtcccaggccctcacccacaaggtccgtctcaacagctgcaggccctgaggaccagcccctcatgcctacagggtcagtcccccacagtggtctgagaaggcactgggaggtactgatcggggtcttggtggtctccatcctgcttctctccctcctcctcttccctcctcctccaacactggcgtcagggaaaacacaggacattggcccagagacaggctgatttccaacgtcctccaggggctgccgagccagagcccaaggacgggggcctacagaggaggtccagcccagctgctgacgtccagggagaaaacttctgtgctgccgtgaagaacacacagcctgaggacggggtggaaatggacactcggagcccacacgatgaagacccccaggcagtgacgtatgccaaggtgaaacactccagacctaggagagaaatggcctctcctccctccccactgtctggggaattcctggacacaaaggacagacaggcagaagaggacagacagatggacactgaggctgctgcatctgaagccccccaggatgtgacctacgcccagctgcacagctttaccctcagacagaaggcaactgagcctcctccatcccaggaaggggcctctccagctgagcccagtgtctatgccactctggccatccactaatccaggggggacccagaccccacaagccatggagactcaggaccccagaaggcatggaagctgcctccagtagacatcactgaaccccagccagcccagacccctgacacagaccactagaagattccgggaacgttgggagtcacctgattctgcaaagataaataatatccctgcattatcaaaataaagtagcagacctctcaattcacaatgagttaactgataaaacaaaacagaagtcagacaatgttttaaattgaatgatcatgtaaatattacacatcaaaccaatgacatgggaaaatgggagcttctaatgaggacaaacaaaaaatagagaaaaattaataaagtcaaaatgtttattcttgaaaacattaatgatacatgaatcttgggggcaccatggagggaaaattccatactgggataaagggaaacctattcaatacaagggccggggggttacccgaaatccgggaattccgcaaaagcgcggggacaataaggtgtgtttcccccgggtggggaaaaaattgtttattacggccctcacgaattttttcccgacatatgaatttccgggagccggggtaagccctcataaagtgtgttaaaaaccctcttgggggggggcccctaaattgtaaaataaggcccccgaaccctccac

SEQ ID NO: 157 - DNA, 5329 bp, Homo sapiens
  misc_feature: Incyte ID No: 291095.5
  unsure 5225, 5317, 5319, 5321: a, t, c, g, or other
gcgggatggcgcgctttgactctggagtgggagtgggagcgagcgcttctgcgactccagttgtgagagccgcaaggggcatgggaattgacgccactcaccgacccccagtctcaatctcaacgctgtgaggaaacctcgactttgccaggtccccaagggcagcggggctcggcgagcgaggcacccttctccgtccccatcccaatccaagcgctcctggcactgacgacgccaagagactcgagtgggagttaaagcttccagtgagggcagcaggtgtccaggccgggcctgcgggttcctgttgacgtcttgccctaggcaaaggtcccagttccttctcggagccggctgtcccgcgccactggaaaccgcacctccccgcagcatgggcaccagcctcagcccgaacgacccttggccgctaaacccgctgtccatccagcagaccacgctcctgctactcctgtcggtgctggccactgtgcatgtgggccagcggctgctgaggcaacggaggcggcagctccggtccgcgcccccgggcccgtttgcgtggccactgatcggaaacgcggcggcggtgggccaggcggctcacctctcgttcgctcgcctggcgcggcgctacggcgacgttttccagatccgcctgggcagctgccccatagtggtgctgaatggcgagcgcgccatccaccaggccctggtgcagcagggctcggccttcgccgaccggccgtccttcgcctccttccgtgtggtgtccggcggccgcagcatggctttcggccactactcggagcactggaaggtgcagcggcgcgcagcccacagcatgatgcgcaacttcttcacgcgccagccgcgcagccgccaagtcctcgagggccacgtgctgagcgaggcgcgcgagctggtggcgctgctggtgcgcggcagcgcggacggcgccttcctcgacccgaggccgctgaccgtcgtggccgtggccaacgtcatgagtgccgtgtgtttcggctgccgctacagccacgacgaccccgagttccgtgagctgctcagccacaacgaagagttcgggcgcacggtgggcgcgggcagcctggtggacgtgatgccctggctgcagtacttccccaacccggtgcgcaccgttttccgcgaattcgagcagctcaaccgcaacttcagcaacttcatcctggacaagttcttgaggcactgcgaaagccttcggcccggggccgccccccgcgacatgatggacgcctttatcctctctgcggaaaagaaggcggccggggactcgcacggtggtggcgcgcggctggatttggagaacgtaccggccactatcactgacatcttcggcgccagccaggacaccctgtccaccgcgctgcagtggctgctcctcctcttcaccaggtatcctgatgtgcagactcgagtgcaggcagaattggatcaggtcgtggggagggaccgtctgccttgtatgggtgaccagcccaacctgccctatgtcctggccttcctttatgaagccatgcgcttctccagctttgtgcctgtcactattcctcatgccaccactgccaacacctctgtcttgggctaccacattcccaaggacactgtggtttttgtcaaccagtggtctgtgaatcatgacccagtgaagtggcctaacccggagaactttgatccagctcgattcttggacaaggatggcctcatcaacaaggacctgaccagcagagtgatgattttttcagtgggcaaaaggcggtgcattggcgaagaactttctaagatgcagctttttctcttcatctccatcctggctcaccagtgcgatttcagggccaacccaaatgagcctgcgaaaatgaatttcagttatggtctaaccattaaacccaagtcatttaaagtcaatgtcactctcagagagtccatggagctccttgatagtgctgtccaaaatttacaagccaaggaaacttgccaataagaagcaagaggcaagctgaaattttagaaatattcacatcttcggagatgaggagtaaaattcagtttttttccagttcctcttttgtgctgcttctcaattagcgtttaaggtgagcataaatcaactgtccatcaggtgaggtgtgctccatacccagcggttcttcatgagtagtgggctatgcaggagcttctgggagattttttttgagtcaaagacttaaagggcccaatgaattattatatacatactgcatcttggttatttctgaaggtagcattctttggagttaaaatgcacatatagacacatacacccaaacacttacaccaaactactgaatgaagaagtattttggtaaccaggccatttttggtgggaatccaagattggtctcccatatgcagaaatagacaaaaagtatattaaacaaagtttcagagtatattgttgaagagacagagacaagtaatttcagtgtaaagtgtgtgattgaaggtgataagggaaaagataaagaccagaaattcccttttcaccttttcaggaaaataacttagactctagtatttatgggtggatttatccttttgccttctggtatacttccttacttttaaggataaatcataaagtcagttgctcaaaaagaaatcaatagttgaattagtgagtatagtggggttccatgatttatcatgaattttaaagtatgcattattaaattgtaaaactccaaggtgatgttgtacctcttttgcttgccaaagtacagaatttgaattatcagcaaagaaaaaaaaaaaagccagccaagctttaaattatgtgaccataatgtactgatttcagtaagtctcataggttaaaaaaaaaagtcaccaaatagtgtgaaatatattacttaactgtccgtaagcagtatattagtattatcttgttcaggaaaaggttgaataatatatgccttgtgtaatattgaaaattgaaaagtacaactaacgcaaccaagtgtgctaaaaatgagcttgattaaatcaaccacctatttttgacatggaaatgaagcagggtttcttttcttcactcaaattttggcgaatctcaaaattagatcctaagatgtgttcttatttttataacatctttattgaaattctatttataatacagaatcttgttttgaaaataacctaattaatatattaaaattccaaattcatggcatgcttaaattttaactaaattttaaagccattctgattattgagttccagttgaagttagtggaaatctgaacattctcctgtggaaggcagagaaatctaagctgtgtctgcccaatgaataatggaaaatgccatgaattacctggatgttctttttacgaggtgacaagagttggggacagaactcccattacaactgaccaagtttctcttctagatgattttttgaaagttaacattaatgcctgctttttggaaagtcagaatcagaagatagtcttggaagctgtttggaaaagacagtggagatgaggtcagttgtgttttttaagatggcaattactttggtagctgggaaagcataaagctcaaatgaaatgtatgcattcacatttagaaaagtgaattgaagtttcaagttttaaagttcattgcaattaaacttccaaagaaagttctacagtgtcctaagtgctaagtgcttattacattttattaagctttttggaatctttgtaccaaaattttaaaaaagggagtttttgatagttgtgtgtatgtgtgtgtggggtggggggatggtaagagaaaagagagaaacactgaaaagaaggaaagatggttaaacattttcccactcattctgaattaattaatttggagcacaaaattcaaagcatggacatttagaagaaagatgtttggcgtagcagagttaaatctcaaataggctattaaaaaagtctacaacatagcagatctgttttgtggtttggaatattaaaaaacttcatgtaattttattttaaaatttcatagctgtacttcttgaatataaaaaatcatgccagtatttttaaaggcattagagtcaactacacaaagcaggcttgcccagtacatttaaattttttggcacttgccattccaaaatattatgccccaccaaggctgagacagtgaatttgggctgctgtagcctatttttttagattgagaaatgtgtagctgcaaaaataatcatgaaccaatctggatgcctcattatgtcaaccaggtccagatgtgctataatctgtttttacgtatgtaggcccagtcgtcatcagatgcttgcggcaaaaggaaagctgtgtttatatggaagaaagtaaggtgcttggagtttacctggcttttttaatatgcttataacctagttaaagaaaggaaaagaaaacaaaaaacgaatgaaaataactgaatttggaggctggagtaatcagattactgctttaatcagaaaccctcattgtgtttctaccggagagagaatgtatttgctgacaaccattaaagtcagaagttttactccaggttattgcaataaagtataatgtttattaaatgcttcatttgtatgtcaaagctttgactctataagcaaattgcttttttccaaaacaaaaagatgtctcaggtttgttttgtgaattttctaaaagctttcatgtcccagaacttagcctttacctgtgaagtgttactacagccttaatattttcctagtagatctatattagatcaaatagttgcatagcagtatatgttaatttgtgtgtttttagctgtgacacaactgtgtgattaaaaggtatactttagtagacatttataactcaaggataccttcttatttaatcttttcttatttttgtactttatcatgaatgcttttagtgtgtgcataatagctacagtgcatagttgtagacaaagtacattctggggaaacaacatttatatgtagcctttactgtttgatataccaaattaaaaaaaaattgtatctcattacttatactgggacaccattaccaaaataataaaaatcactttcataatcttgttatgaagttttatgttgtagcaaatatagtctaatgtatcactttatttcaactattacagtgcaatattttaattgaatnatccatagtaatagttgaaataaagtgatacattagactatatttcaactattactatggattattcaattaaaatattgcactgtaaaaanananaaaaaggg

SEQ ID NO: 158 - DNA, 1889 bp, Homo sapiens
  misc_feature: Incyte ID No: 332919.4
  unsure 1655-1681, 1882: a, t, c, g, or other
gctcgagggagtgttacttcggttcccaggttggaagattatctcacccggccccagctatataagctgaccggtgtggaggggcccagcagggccaactccagggattccttccacgacagaaaaacatacaagactccttcagccaacatgatggtactgaaagtagaggaactggtcactggaaagaagaatggcaatggggaggcaggggaattccttcctgaggatttcagagatggagagtatgaagctgctgttactttagagaagcaggaggatctgaagacacttctagcccaccctgtgaccctgggggagcaacagtggaaaagcgagaaacaacgagaggcagagctcaaaaagaaaaaactagaacaaagatcaaagcttgaaaatttagaagaccttgaaataatcattcaactgaagaaaaggaaaaaatacaggaaaactaaagttccagttgtaaaggaaccagaacctgaaatcattacggaacctgtggatgtgcctacgtttctgaaggctgctctggagaataaactgccagtagtagaaaaattcttgtcagacaagaacaatccagatgtttgtgatgagtataaacggacagctcttcatagagcatgcttggaaggacatttggcaattgtggagaagttaatggaagctggagcccagatcgaattccgtgatatgcttgaatccacagccatccactgggcaagccgtggaggaaacctggatgttttaaaattgttgctgaataaaggagcaaaaattagcgcccgagataagttgctcagcacagcgctgcatgtggcggtgaggactggccactatgagtgcgcggagcatcttatcgcctgtgaggcagacctcaacgccaaagacagagaaggagataccccgttgcatgatgcggtgagactgaaccgctataagatgatccgactcctgattatgtatggcgcggatctcaacatcaagaactgtgctgggaagacgccgatggatctggtgctacactggcagaatggaaccaaagcaatattcgacagcctcagagagaactcctacaagacctctcgcatagctacattctgaggcaaacgacagactcttaatcagtaaatgttcactggcattttgaaggcatggcccaagagaagagacactagccataaaatctagtttctatttatcaacgtgttgtgaagatgtacctaatgaagttttgagaaagcacagggttataggtgtttaaatttcctttagtgaaactcttatttatttttatgtattcctgtttatttatttactgccacgctactgatattcagaccttcatgatcatccatctggtgagcagagcttcatttgtatataacactttcagagccttcccacccataggtagttcttaaaccaggtgaaagagcaaagttcaagtgcctacttatgtgtcattcgctcatgtaagagtttttaagagagggctgattatcacagccctcttttctcctgaatttttaatgcagaagtttgaatgaagcaagggaaggcatgtagggacaggaaaggaaacaatggaaggaaagtgattctgtgaaaaggacagtgaagccagctattttacccccaggctggannnnnnnnnnnnnnnnnnnnnnnnnnnaccgagtacacagagtacccaagtgaagagaacgtcatgagtgtaagtgcaaatcagtggaaggagcggcaaactgggacatgcagaattgaatttgctcaaaaaagatgaaaggaaatgcaaactgtaaatgtataaatgtatattgtattgtatgtacattttatattcataataaaggcaatcaaactctaaaaaaanaaaaaaa

SEQ ID NO: 159 - DNA, 3128 bp, Homo sapiens
  misc_feature: Incyte ID No: 387130.26
  unsure 60, 69: a, t, c, g, or other
gggaaggtggctgtggagagtggagttaggacagtgggggagaagttaaaactgtagggnttggccaanctgggtgaggggatccaagcagtgctagacatgctcttgaatgcccctccttttcctggccctccccccaggtatgctctggcatcccatttcttctggggtctgtggtccatcctccaggcatccatgtccaccatagaatttggttacttggactatgcccagtctcggttccagttctacttccagcagaaggggcagctgaccagtgtccactcctcatcctgactccaccctcccactccttggatttctcctggagcctccagggcaggaccttggagggaggaacaacgagcagaaggccctggcgactgggctgagcccccaagtgaaactgaggttcaggagaccggcctgttcctgagtttgactctaatgccaccatcctcacgagactctggggccccccaggctcccagacctttgagcaaccttcaccgcacagaaacccagccgcgccctgcaattcccaccgcggaaggtgccgaccaacccccaggatggcggaagctcaccaggccgtggccttccagttcacggtgaccccagacggggtcgacttccggctcagtcgggaggccctgaaacacgtctacctgtctgggatcaactcctggaagaaacgcctgatccgcatcaagaatggcatcctcaggggcgtgtaccctggcagccccaccagctggctggtcgtcatcatggcaacagtgggttcctccttctgcaacgtggacatctccttggggctggtcagttgcatccagagatgcctccctcaggggtgtggcccctaccagaccccgcagacccgggcacttctcagcatggccatcttctccacgggcgtctgggtgacgggcatcttcttcttccgccaaaccctgaagctgcttctctgctaccatgggtggatgtttgagatgcatggcaagaccagcaacttgaccaggatctgggctatgtgtatccgccttctatccagccggcaccctatgctctacagcttccagacatctctgcccaagcttcctgtgcccagggtgtcagccacaattcagcggtacctagagtctgtgcgccccttgttggatgatgaggaatattaccgcatggagttgctggccaaagaattccaggacaagactgcccccaggctgcagaaatacctggtgctcaagtcatggtgggcaagtaactatgtgagtgactggtgggaagagtacatctaccttcgaggcaggagccctctcatggtgaacagcaactattatgtcatggaccttgtgctcatcaagaatacagacgtgcaggcagcccgcctgggaaacatcatccacgccatgatcatgtatcgccgtaaactggaccgtgaagaaatcaagcctgtgatggcactgggcatagtgcctatgtgctcctaccagatggagaggatgttcaacaccactcggatcccgggcaaggacacagatgtgctacagcacctctcagacagccggcacgtggctgtctaccacaagggacgcttcttcaagctgtggctctatgagggcgcccgtctgctcaagcctcaggatctggagatgcagttccagaggatcctggacgacccctccccacctcagcctggggaggagaagctggcagccctcactgcaggaggaagggtggagtgggcgcaggcacgccaggccttctttagctctggaaagaataaggctgccttggaggccatcgagcgtgccgctttcttcgtggccctggatgaggaatcctactcctatgaccccgaagatgaggccagcctcagcctctatggcaaggccctgctacatggcaactgctacaacaggtggtttgacaaatccttcactctcatttccttcaagaatggccagttgggtctcaatgcagagcatgcgtgggcagatgctcccatcattgggcacctctgggagtttgtcctgggcacagacagcttccacctgggctacacggagaccgggcactgcctgggcaaaccgaaccctgcgctcgcacctcctacacggctgcagtgggacattccaaaacagtgccaggcggtcatcaagagttcctaccaggtggccaaggcgttggcagacgacgtggagttgtactgcttccagttcctgccctttggcaaaggcctcatcaagaagtgccggaccagccctgatgcctttgtgcagatcgcgctgcagctggctcacttccgggacaggggtaagttctgcctgacctatgaggcctcaatgaccagaatgttccgggagggacggactgagactgtgcgttcctgtaccagcgagtccacagcctttgtgcaggccatgatggaggggtcccacacaaaagcagacctgcgagatctcttccagaaggctgctaagaagcaccagaatatgtaccgcctggccatgaccggggcagggatcgacaggcacctcttctgcctttacttggtctccaagtacctaggagtcagctctcctttccttgctgaggtgctctcggaaccctggcgtctctccaccagccagatcccccaatcccagatccgcatgttcgacccagagcagcaccccaatcacctgggcgctggaggtggctttggccctgtagcagatgatggctatggagtttcctacatgattgcaggcgagaacacgatcttcttccacatctccagcaagttctcaagctcagagacgaacgcccagcgctttggaaaccacatccgcaaagccctgctggacattgctgatcttttccaagttcccaaggcctacagctgaagcccttaggtacctgtgttttgtttgggaactcggaggccctccccctcccccagctcagaccacagaggtggcaagagaagggctgaagctggaagactgttcatgagggacttgtgtgacctgctttgaaatgtgtgactctgctgagtgacgtaggctctgagatagctgtccacgcccacgtgtttgcttggaataaatacttgcctcagaaccttcaaaaaaaaaaaaaaa

SEQ ID NO: 160 - DNA, 3171 bp, Homo sapiens
  misc_feature: Incyte ID No: 410580.13
  unsure 2732-2835, 2837, 2839, 2846, 2861, 2868-2869, 3158: a, t, c, g, or other
acagctgtgtttggctgcagggccaagagcgctgtcaagaagacccacacgcccccctgccagcagctgaattcctggcagctcagcagccgccgccagagcaggacgaaccgccaatcgcaagggcacctctgagaacttcaggatgcagatgtctccagccctcacctgcctagtcctgggcctggcccttatctttggtgaagggtctgctgtgcaccatcccccatcctacgtgggcccacctggcctcagacttcggggtgagggtgtttcagcaggtggcgcaggcctccaaggaccgcaacgtggttttctcaccctatggggtggcctcggtgttggccatgctccagctgacaacaggaggagaaacccagcagcagattcaagcagctatgggattcaagattgatgacaagggcatggcccccgccctccggcatctgtacaaggagctcatggggccatggaacaaggatgagatcagcaccacagacgcgatcttcgtccagcgggatctgaagctggtccagggcttcatgccccacttcttcaggctgttccggagcacggtcaagcaagtggacttttcagaggtggagagagccagattcatcatcaatgactgggtgaagacacacacaaaaggtatgatcagcaacttgcttgggaaaggagccgtggaccagctgacacggctggtgctggtgaatgccctctacttcaacggccagtggaagactcccttccccgactccagcacccaccgccgcctcttccacaaatcagacggcagcactgtctctgtgcccatgatggctcagaccaacaagttcaactatactgagttcaccacgcccgatggccattactacgacatcctggaactgccctaccacggggacaccctcagcatgttcattgctgccccttatgaaaaagaggtgcctctctctgccctcaccaacattctgagtgcccagctcatcagccactggaaaggcaacatgaccaggctgccccgcctcctggttctgcccaagttctccctggagactgaagtcgacctcaggaagcccctagagaacctgggaatgaccgacatgttcagacagtttcaggctgacttcacgagtctttcagaccaagagcctctccacgtcgcgcaggcgctgcagaaagtgaagatcgaggtgaacgagagtggcacggtggcctcctcatccacagctgtcatagtctcagcccgcatggcccccgaggagatcatcatggacagacccttcctctttgtggtccggcacaaccccacaggaacagtccttttcatgggccaagtgatggaaccctgaccctggggaaagacgccttcatctgggacaaaactggagatgcatcgggaaagaagaaactccgaagaaaagaattttagtgttaatgactctttctgaaggaagagaagacatttgccttttgttaaaagatggtaaaccagatctgtctccaagaccttggcctctccttggaggacctttaggtcaaactccctagtctccacctgagaccctgggagagaagtttgaagcacaactcccttaaggtctccaaaccagacggtgacgcctgcgggaccatctggggcacctgcttccacccgtctctctgcccactcgggtctgcagacctggttcccactgaggccctttgcaggacggaactacggggcttacaggagcttttgtgtgcctggtagaaactatttctgttccagtcacattgccatcactcttgtactgcctgccaccgcggaggaggctggtgacaggccaaaggccagtggaagaaacaccctttcatctcagagtccactgtggcactggccacccctccccagtacaggggtgctgcaggtggcagagtgaatgtcccccatcatgtggcccaactctcctggcctggccatctccctccccagaaacagtgtgcatgggttattttggagtgtaggtgacttgtttactcattgaagcagatttctgcttccttttatttttataggaatagaggaagaaaggtcagatgcgtgcccagctcttcaccccccaatctcttggtggggaggggtgtacctaaatatttatcatatccttgcccttgagtgcttgttagagagaaagagaactactaaggaaaataatattatttaaactcgctcctagtgtttctttgtggtctgtgtcaccgtatctcaggaagtccagccacttgactggcacacacccctccggacatccagcgtgacggagcccacactgccaccttgtggccgcctgagaccctcgcgccccccgcgccccccgcgcccctctttttccccttgatggaaattgaccatacaatttcatcctccttcaggggatcaaaaggacggagtggggggacagagactcagatgaggacagagtggtttccaatgtgttcaatagatttaggagcagaaatgcaaggggctgcatgacctaccaggacagaactttccccaattacagggtgactcacagccgcattggtgactcacttcaatgtgtcatttccggctgctgtgtgtgagcagtggacacgtgaggggggggtgggtgagagagacaggcagctcggattcaactaccttagataatatttctgaaaacctaccagccagagggtagggcacaaagatggatgtaatnnnnnnnnnnnnnnnnnnnnnnnnnnnnnnnnnnnnnnnnnnnnnnnnnnnnnnnnnnnnnnnnnnnnnnnnnnnnnnnnnnnnnnnnnnnnnnnnnnnnnnnntnantatactnaaatatatatttctnatatctnnaaatatagatatatatggtaaagaccaatttatgggagaattgcacacagatgtgaaatgaatgtaatctaatagaagcctaatcagcccaccatgttctccactgaaaaatcctctttctttggggtttttctttctttcttttttgattttgcactggacggtgacgtcagccatgtacaggatccacaggggtggtgtcaaatgctattgaaattgtgttgaattgtatgctttttcacttttgataaataaacatgtaaaaatgtttcaaaaaaataataaaatnaataaatacgaag

SEQ ID NO: 161 - DNA, 4034 bp, Homo sapiens
  misc_feature: Incyte ID No: 251715.1
  unsure 3303-3501: a, t, c, g, or other
gagatcccagcgctgcagaacttggggagccgccgccgccatccgccgccgcagccagcttcctgccgccgcaggaccggcccctgccccagcctccgcagccgcggcgcgtccacgcccgcccgcgcccagggcgagtcggggtcgccgcctgcacgcttctcagtgttccccgcgccccgcatgtaacccggccaggcccccgcaactgtgtcccctgcagctccagccccgggctgcacccccccgccccgacaccagctctccagcctgctcgtccaggatggccgcggccaaggccgagatgcagctgatgtccccgctgcagatctctgacccgttcggatcctttcctcactcgcccaccatggacaactaccctaagctggaggagatgatgctgctgagcaacggggctccccagttcctcggcgccgccggggccccagagggcagcggcagcaacagcagcagcagcagcagcgggggcggtgaaggcggcgggggcggcagcaacagcagcagcagcagcagcaccttcaaccctcaggcggacacgggcgagcagccctacgagcacctgaccgcagagtcttttcctgacatctctctgaacaacgagaaggtgctggtggagaccagttaccccagccaaaccactcgactgccccccatcacctatactggccgcttttccctggagcctgcacccaacagtggcaacaccttgtggcccgagcccctcttcagcttggtcagtggcctagtgagcatgaccaacccaccggcctcctcgtcctcagcaccatctccagcggcctcctccgcctccgcctcccagagcccacccctgagctgcgcagtgccatccaacgacagcagtcccatttactcagcggcacccaccttccccacgccgaacactgacattttccctgagccacaaagccaggccttcccgggctcggcagggacagcgctccagtacccgcctcctgcctaccctgccgccaagggtggcttccaggttcccatgatccccgactacctgtttccacagcagcagggggatctgggcctgggcaccccagaccagaagcccttccagggcctggagagccgcacccagcagccttcgctaacccctctgtctactattaaggcctttgccactcagtcgggctcccaggacctgaaggccctcaataccagctaccagtcccagctcatcaaacccagccgcatgcgcaagtaccccaaccggcccagcaagacgcccccccacgaacgcccttacgcttgcccagtggagtcctgtgatcgccgcttctcccgctccgacgagctcacccgccacatccgcatccacacaggccagaagcccttccagtgccgcatctgcatgcgcaacttcagccgcagcgaccacctcaccacccacatccgcacccacacaggcgaaaagcccttcgcctgcgacatctgtggaagaaagtttgccaggagcgatgaacgcaagaggcataccaagatccacttgcggcagaaggacaagaaagcagacaaaagtgttgtggcctcttcggccacctcctctctctcttcctacccgtccccggttgctacctcttacccgtccccggttactacctcttatccatccccggccaccacctcatacccatcccctgtgcccacctccttctcctctcccggctcctcgacctacccatcccctgtgcacagtggcttcccctccccgtcggtggccaccacgtactcctctgttccccctgctttcccggcccaggtcagcagcttcccttcctcagctgtcaccaactccttcagcgcctccacagggctttcggacatgacagcaaccttttctcccaggacaattgaaatttgctaaagggaaaggggaaagaaagggaaaagggagaaaaagaaacacaagagacttaaaggacaggaggaggagatggccataggagaggagggttcctcttaggtcagatggaggttctcagagccaagtcctccctctctactggagtggaaggtctattggccaacaatcctttctgcccacttccccttccccaattactattccctttgacttcagctgcctgaaacagccatgtccaagttcttcacctctatccaaagaacttgatttgcatggattttggataaatcatttcagtatcatctccatcatatgcctgaccccttgctcccttcaatgctagaaaatcgagttggcaaaatggggtttgggcccctcagagccctgccctgcacccttgtacagtgtctgtgccatggatttcgtttttcttggggtactcttgatgtgaagataatttgcatattctattgtattatttggagttaggtcctcacttgggggaaaaccacaaaaggaaaagccaagcaaaccaatggtgatcctctattttgtgatgatgctgtgacaataagtttgaacctttttttttgaaacagcagtcccagtattctcagagcatgtgtcagagtgttgttccgttaacctttttgtaaatactgcttgaccgtactctcacatgtggcaaaatatggtttggtttttcttttttttttttttgaaagtgttttttcttcgtccttttggtttaaaaagtttcacgtcttggtgccttttgtgtgatgcgccttgctgatggcttgacatgtgcaattgtgagggacatgctcacctctagccttaaggggggcagggagtgatgatttgggggaggctttgggagcaaaataaggaagagggctgagctgagcttcggttctccagaatgtaagaaaacaaaatctaaaacaaaatctgaactctcaaaagtctatttttttaactgaaaatgtaaatttataaatatattcaggagttggaatgttgtagttacctactgagtaggcggcgatttttgtatgttatgaacatgcagttcattattttgtggttctattttactttgtacttgtgtttgcttaaacaaagtgactgtttggcttataaacacattgaatgcgctttattgcccatgggatatgtggtgtatatccttccaaaaaattaaaacgaaaataaagtagctgcgattgggtatgtgtttcctgggttaggggaaggactctgccctattgagggctgtgaggttttctgaagacttggcctttagagatacaaggatcctccagccagagtcaggcccactgtgtgaaactggagttcgttatttatgaggactgagtatgggnnnnnnnnnnnnnnnnnnnnnnnnnnnnnnnnnnnnnnnnnnnnnnnnnnnnnnnnnnnnnnnnnnnnnnnnnnnnnnnnnnnnnnnnnnnnnnnnnnnnnnnnnnnnnnnnnnnnnnnnnnnnnnnnnnnnnnnnnnnnnnnnnnnnnnnnnnnnnnnnnnnnnnnnnnnnnnnnnnnnnnnnnnnnnnnnnnnnnnnttcttgataatgggcctgttcctcttcagtctgttgggctgaagctttaccttggttagctaaagccaagaaaggcaagagttagggctgggacatgtgtggccaaaggcagtgttactctcctggcatcaaatgttgggccagtcccgtcccccacctctactcagggttggaaaacccatgatcttgggaatccctgccatgtgcagttagaggaggtaagaagtaggcacaaggcctttaggggaacagtaacaatgctggggccgactcagcctctccctcccattccccaggtccccagcaacttgagggcatcaaagaagcctagacgaggtaaaggccagttctcaagccaagaatccttccaggaagaaattcttattacttgccagctggaactgccatccttggcagcttcgtgggacaaaggatagagtgggcagaagcctggcctggtgtctaaagttcccatccgggccaaatctgttcccattgtgtaggaggcctgaggttctaggttcttttgggcc

SEQ ID NO: 162 - DNA, 459 bp, Homo sapiens
  misc_feature: Incyte ID No: 1799017F6
  unsure 6, 239, 367, 452: a, t, c, g, or other
cgaaancactctgtaatcgtgatgtcatccgtagaaaacagtaggcacagcagcccaactgggggcccaagaggacgtcttaatggcacaggaggccctcgtgaatgtaacagcttcctcaggcatgccagagaaacccctgattcctaccgagactctcctcatagtgaaaggtaaaaccgaaggcaaagctactgcagaggagaaactcagtcagagaatccctgtgagcacctgcngtctcacctcaggaaatctactctaatcagaataaggggcggcagttacctgttctaggagtgctcctagttgatgaagtcatctctttgtttgacgggacttatttcttctgagcttctctcgtcgncccagtgactgaccaggcaacagactcttaaagagctgggatgctttgatgcggaaaggtgcagcacatggagtttccagctctnggccatg

SEQ ID NO: 163 - DNA, 5873 bp, Homo sapiens
  misc_feature: Incyte ID No: 348891.1
cggcggactcggcttgttgtgttgctgcctgagtgccggagacggtcctgctgctgccgcagtcctgccagctgtccgacgatgtcgtcccacctagtcgagccgccgccgcccctgcacaacaataacaacaactgcgaggaaaatgagcagtctctgcccccgccggccggcctcaacagttcctgggtggagctacccatgaacagcagcaatggcaatgataatggcaatgggaaaaatggggggctggaacacgtaccatcctcatcctccatccacaatggagacatggagaagattcttttggatgcacaacatgaatcaggacagagtagttccagaggcagttctcactgtgacagcccttcgccacaagaagatgggcagatcatgtttgatgtggaaatgcacaccagcagggaccatagctctcagtcagaagaagaagttgtagaaggagagaaggaagtcgaggctttgaagaaaagtgcggactgggtatcagactggtccagtagacccgaaaacattccacccaaggagttccacttcagacaccctaaacgttctgtgtctttaagcatgaggaaaagtggagccatgaagaaagggggtattttctccgcagaatttctgaaggtgttcattccatctctcttcctttctcatgttttggctttggggctaggcatctatattggaaagcgactgagcacaccctctgccagcacctactgagggaaaggaaaagcccctggaaatgcgtgtgacctgtgaagtggtgtattgtcacagtagcttatttgaacttgagaccattgtaagcatgacccaacctaccaccctgtttttacatatccaattccagtaactctcaaattcaatattttattcaaactctgttgaggcattttactaaccttataccctttttggcctgaagacattttagaatttcctaacagagtttactgttgtttagaaatttgcaagggcttcttttccgcaaatgccaccagcagattataattttgtcagcaatgctattatctctaattagtgccaccagactagacctgtatcattcatggtataaattttactcttgcaacataactaccatctctctcttaaaacgagatcaggttagcaaatgatgtaaaagaagctttattgtctagttgttttttttcccccaagacaaaggcaagtttccctaagtttgagttgatagttattaaaaagaaaacaaaacaaaaaaaaaaggcaaggcacaacaaaaaaatatcctgggcaataaaaaaaatattttaaaccagctttggagccacttttttgtctaagcctcctaatagcgtcttttaatttataggaggcaaactgtataaatgataggtatgaaatagaataagaagtaaaatacatcagcagattttcatactagtatgttgtaatgctgtcttttctatggtgtagaatctttctttctgataaggaacgtctcaggcttagaaatatatgaaattgctttttgagatttttgcgtgtgtgtttgatattttttacgataattagctgcatgtgaatttttcatgaccttctttacattttttattttttatttctttatttttttttctctaagaagaggctttggaatgagttccaatttgtgatgttaatacaggcttcttgttttaggaagcatcacctatactctgaagcctttaaactctgaagagaattgtttcagagttattccaagcacttgtgcaacttggaaaaacagacttgggttgtgggaacagttgacagcgttctgaaaagatgccatttgtttccttctgatctctcactgaataatgtttactgtacagtcttcccaaggtgattcctgcgactgcaggcactggtcattttctcatgtagctgtcttttcagttatggtaaactcttaaagttcagaacactcaacagattccttcagtgatatacttgttcgttcatttctaaaatgtgaagctttaggaccaaattgttagaaagcatcaggatgaccagttatctcgagtagattttcttggatttcagaacatctagcatgactctgaaggataccacatgttttatatataaataattactgtttatgatatagacattgatattgactatttagagaaccgttgttaattttaaaactagcaatctataaagtgcaccaggtcaacttgaataaaaacactatgacagacaggtttgccagtttgcagaaactaactcttttctcacatcaacatttgtaaaattgatgtgttatagtggaaaataacatatagattaaacaaaatttttatcttttttcaagaatatagctggctatctttaagaaagatgatatatcctagttttgaaagtaattttcttttttctttctagcatttgatgtctaaataattttggacatctttttcctagaccatgtttctgtcttactcttaaacctggtaacacttgatttgccttctataacctatttatttcaagtgttcatatttgaatttctttgggaagaaagtaaatctgatggctcactgatttttgaaaagcctgaataaaattggaaagactggaaagttaggagaactgactagctaaactgctacagtatgcaatttctattacaattggtattacaggggggaaaagtaaaattacactttacctgaaagtgacttcttacagctagtgcattgtgctctttccaagttcagcagcagttctatcagtggtgccactgaaactgggtatatttatgatttctttcagcgttaaaaagaaacatagtgttgccctttttcttaaagcatcagtgaaattatggaaaattacttaaaacgtgaatacatcatcacagtagaatttattatgagagcatgtagtatgtatctgtagccctaacacatgggatgaacgttttactgctacacccagatttgtgttgaacgaaaacattgtggtttggaaaggagaattcaacaattaatagttgaaattgtgaggttaatgtttaaaaagctttacacctgtttacaatttggggacaaaaaggcaggcttcatttttcatatgtttgatgaaaactggctcaagatgtttgtaaatagaatcaagagcaaaactgcacaaacttgcacattggaaagtgcaacaagttcccgtgattgcagtaaaaatatttactattctaaaaaaatgagaattgaagacttagccagtcagataagttttttcatgaacccgttgtggaaattattggaattaactgagccaaagtgattatgcattcttcatctattttagttagcactttgtatcgttatatacagtttacaatacatgtataacttgtagctataaacattttggccgtgttaaattattgtacatatctgagagagggaggtggggccctggccacagcaaaagtgacgacctctttcttgggtgaggtaagaaaatgtcccccacccccttttaggtctgactccttattaagtggcttcccctcaataaatgatgagcatcaaccctttcccacccagggtgccgagggtagagggaggagcaagtggatgaagtgctctgaaaaggatagtgcagcggctctagccaccgtgcgtcctctgccctggctctgaagggcctgaccctgggctgcacccccttgctggggatggaagaccattcagtactcagccctacaccagggcatctacccaggaagataggaggacagagtgtgaaaggggctgtgtcaccctgtcaggtcacgaacaggaggtggcaatggatgcagtgacacaccagtgggagctgctggctgccccttgcagcccactccccaaactggctacccaggcatccaggcattctggccctggagctcagggaggcagccctgagagtcggagcagggaaccacaggcctagctggccctgccagggggatacccacaacagcctgacatggcgctcaattcccacacgccagctcaaggctcctgtccatgcagctcaatgttacttgtgtgtgcatgtcctgtgtagaggggaaggctgcaggggggcactgctgtgccacccacccaggggttcagggcatgcaggggaccctaagcctagtatacgagccaagaccaaaaagggttaaaggctctgtctcccctccctccccttctcccaacatgccccgccctccttgggcactagaaagttttgcgatgaatagcacgggagccatcctcttcatactcctttttggacacccacatcttcttaaaagtgtccagcgaggccaggatggagccgccaatccatgtggagtacagccgttcctgcggggctgagatcttgattttgatatcctttggggcaagcttcttcacttcactgagtaatcggtctccgaagcctttgaaaagcgttgagccacctgagagcacgatgttggcgaacagcgtccggcgcaggtccatgtcggacttgtgtatggcgaaggccaccacctcatggagcccctcactctcatccccgacaaggtccggctggaacagcagctcgggggcccggaatcgtgcaggccccacatcaagcgtgctgccgtctggcaacgtgtactgcaccttctccgtctccagagcctcatccttctgtgggttgatggacaggtagcacgctcgctctttgattgtccggacaacctcaaactcagccgaggtatggaagtcaaccccttccttgcgcagcatgagtcggaggtagcgggagacgtcgcggccggcaatgtccacccgcatgatggagtgaggcatggcaaagccctcatagatgggcacagcatgagtgaccccgtcccctgagtctagaaccactcctgtcgtgcgtcctgttgcgtacagactgagcacagcctgcatggagatgaacagggccggcacgttgaaggtctcaaagaacacctctgccgccttctcccggttcttactcgggttgagcggggcctccgtgaggagcacaggatgctcctccgagaaggtctgcagctgatccttggagtagacgtactgccagatgcgttccatgtcgttccagtctcgcaccacgccgtgctccatggggtagcggatggtcagcagcccccggtgctcctctgcttttggtccgatgaagaggtccccctccagggctccagccatcacccgcatgtgcttcggccgcccgacactgttaggacggataacgtcagcaaggtgggcagggagcatggcagagcttgtgtccagaaaaaccgaaatccaaccatagtcgcccagagggtacctggcctccaaacaccaggatgtggctggggggcacaggttggaactggggcctatggggttcggggctagagagggggcctaggcaggacgagaagctcagggtcagaaggcacggtcagcagagacagctgcatgtctgagcgccagaacccagccctccacggcccagcccttgcagagggtcggcttcctgcagccacagtgactcagcccacgctcctgacttcggtggggcagggctgccgtcaccatccacagactgagggaggacaaccccaggaagctgggtcggggctcccttgtgcaccctgctctcactcagtcaagcgccctaccccactgccagcgcttctggatcagagattcagttcttggaaactataggatctgatgagctaccactaaaggcaaaggaacctctaattatacccatgcagtcagacaggaatgctgaagctcgacaaggcgcaccatgctagctctgtc

SEQ ID NO: 164 - DNA, 3370 bp, Homo sapiens
  misc_feature: Incyte ID No: 903956.15
ggcgcttggtggccactggcggccgaggtagaggcagtggcgcttgagttggtcgggggcagcggcagatttgaggcttaagcaacttcttccggggaagagtgccagtgcagccactgttacaattcaagatcttgatctatatccatagattggaatattggtgggccagcaatcctcagacgcctcacttaggacaagctgtaaaaattaaaatgaacaaattacggcaaagttttaggagaaagaaggatgtttatgttccagaggccagtcgtccacatcagtggcagacagatgaagaaggcgttcgcaccggaaaatgtagcttcccggttaagtaccttggccatgtagaagttgatgaatcaagaggaatgcacatctgtgaagatgctgtaaaaagattgaaagctactggaaagaaagcagttaaagcagttctgtgggtctcagcagatggactcagagttgtggatgaaaaaactaaggacctcatagttgaccagacgatagagaaagtttctttctgtgccccagacaggaactttgatagagccttttcttacatatgccgtgatggcaccactcgtcgctggatctgtcactgcttcatggctgtcaaggacacaggtgaaaggttgagccatgcagtaggctgtgcttttgcagcctgtttagagcgcaagcagaagcgggagaaggaatgtggagtgactgctacttttgatgctagtcggaccacttttacaagagaaggatcattccgtgtcacaacagccactgaacaagcagaaagagaggagatcatgaaacaaatgcaagatgccaagaaagctgaaacagataagatagtcgttggttcatcagttgcccctggcaacactgccccatccccatcctctcccacctctcctacttctgatgccacgacctctctggagatgaacaatcctcatgccatcccacgccggcatgctccaattgaacagcttgctcgccaaggctctttccgaggttttcctgctcttagccagaagatgtcaccctttaaacgccaactatccctacgcatcaatgagttgccttccactatgcagaggaagactgatttccccattaaaaatgcagtgccagaagtagaaggggaggcagagagcatcagctccctgtgctcacagatcaccaatgccttcagcacacctgaggaccccttctcatctgctccgatgaccaaaccagtgacagtggtggcaccacaatctcctaccttccaagggaccgagtggggtcaatcttctggtgctgcctctccaggtctcttccaggccggtcatagacgtactccctctgaggccgaccgatggttagaagaggtgtctaagagcgtccgggctcagcagccccaggcctcagctgctcctctgcagccagttctccagcctcctccacccactgccatctcccagccagcatcacctttccaagggaatgcattcctcacctctcagcctgtgccagtgggtgtggtcccagccctgcaaccagcctttgtccctgcccagtcctatcctgtggccaatggaatgccctatccagcccctaatgtgcctgtggtgggcatcactccctcccagatggtggccaacgtatttggcactgcaggccaccctcaggctgcccatccccatcagtcacccagcctggtcaggcagcagacattccctcactacgaggcaagcagtgctaccaccagtcccttctttaagcctcctgctcagcacctcaacggttctgcagctttcaatggtgtagatgatggcaggttggcctcagcagacaggcatacagaggttcctacaggcacctgcccagtggatccttttgaagcccagtgggctgcattagaaaataagtccaagcagcgtactaatccctcccctaccaaccctttctccagtgacttacagaagacgtttgaaattgaactttaagcaatcattatggctatgtatcttgtccataccagacagggagcagggggtagcggtcaaaggagcaaaacagactttgtgtcctgattagtactcttttcactaatcccaaaggtcccaaggaacaagtccaggcccagagtactgtgaggggtgattttgaaagacatgggaaaaagcattcctagagaaaagctgccttgcaattaggctaaagaagtcaaggaaatgttgctttctgtactccctcttcccttacccccttacaaatctctggcaacagagaggcaaagtatctgaacaagaatctatattccaagcacatttactgaaatgtaaaacacaacaggaagcaaagcaatctccctttgtttttcaggccattcacctgcctcctgtcagtagtggcctgtattagagatcaagaagagtggtttgtgctcaggctggggaacagagaggcacgctatgctgccagaattcccaggagggcatatcagcaactgcccagcagagctatattttgggggagaagttgagcttccattttgagtaacagaataaatattatatatatcaaaagccaaaatctttatttttatgcatttagaatattttaaatagttctcagatattaagaagttgtatgagttgtaagtaatcttgccaaaggtaaaggggctagttgtaagaaattgtacataagattgatttatcattgatgcctactgaaataaaaagaggaaaggctggaagctgcagacaggatccctagcttgttttctgtcagtcattcattgtaagtagcacattgcaacaacaatcatgcttatgaccaatacagtcactaggttgtagttttttttaaataaaggaaaagcagtattgtcctggttttaaacctatgatggaattctaatgtcattattttaatggaatcaatcgaaatatgctctatagagaatatatcttttatatattgctgcagtttccttatgttaatcttttaacactaaggtaacatgacataatcataccatagaagggaacacaggttaccatattggtttgtaatatgggtcttggtgggttttgttttatcctttaaattttgttcccatgagttttgtggggatggggattctggttttattagctttgtgtgtgtcctcttcccccaaacccccttttggtgagaacatccccttgacagttgcagcctcttgacctcggataacaataagagagctcatctcatttttacttttgaacgttggccttacaatcaaatgtaagttatatatatttgtactgatgaaaatttataatctgctttaacaaaaataaatgttcatggtagaaaaaaaaaaaaaagg

SEQ ID NO: 165 - DNA, 980 bp, Homo sapiens
  misc_feature: Incyte ID No: 235184.1
aaaaaaggagcgggggtgcgcggagaacacaaagtaaaacttctgctgttcccagtcctgcagccccagcccagccgtcccccgcgggcgtggcaggtcctgagtcaggggcctgtccgtggccagcatccctggctgggcgattgagcagcgggaagctgcttggacccagtctcaaacttaaccctcatctagcacccgggcaggcctcctgggttgcagggacttgagaaaaggcagagttctcaggtcctaggaagctggggcacgctggcgtgacaagcgtcccggagaaagccaagccctcggggagctggggaccgcagcagggctgcagtcacatcctgcgcgggtgggcggcgggccaggccttcagttgtttcgggacgcgccgagcttcgccgctcttccagcggctccgctgccagagctagcctgagcccggttctggggcgaaaatgcctgcccttcacatcgaagatttgccagagaaggaaaaactgaaaatggaagttgagcagcttcgcaaagaagtgaagttgcagagacaacaagtgtctaaatgttctgaagaaataaagaactatattgaagaacgttctggagaggatcctctagtaaagggaattccagaagacaagaacccctttaaagaaaaaggcagctgtgttatttcataaataacttgggagaaactgcatcctaagtggaagaactagtttgttttagttttcccagataaaaccaacatgctttttaaggaaggaagaatgaaattaaaaggagactttcttaagcaccatatagatagggttatgtataaaagcatatgtgctactcatctttgctcactatgcagtcttttttaagagagcagagagtatcagatgtacaattatggaaataagaacattacttgagcatgacacttctttcagtatattgcttgatgcttcaaataaagttttgtcttgggaaaa

SEQ ID NO: 166 - DNA, 4527 bp, Homo sapiens
  misc_feature: Incyte ID No: 330948.3
ctcggcgcgcctggacccctgcccctctctgggtggagaagctcccggccgcttcccggtttcactccttctcagcctgggctcccagcccctctctccttttcctggactggctctcacccccttcggtccccttcctttagctcaggctccctaccccttcctttagcccacagcccagagtcccagctcctcagtcactttcctcagccaaaggtcccagccttccttcttcctttcctttgcactatccctatcctgccccttcctctatccctagggctcagtttcccacatccgtcctcccccttcccaggcccggagttccagaccttttggtctcctttcgtggtcgttcctgggtccttgccccctttccccactttggagttccagattgcaaacccagcctccctccacccccagaaaattgcttccatggaaatgcctctctaaaacatgaacttttcctagagactacgccagtctctcttcccacttgctgaccctttgctacctatgtgcccggttttactctcatttgggtaaggtcgaggctggctctggaagcagcaccatggttctgcggtctggcatctgtggcctctctccacatcggatcttcccttccttactcgtggtggtcgctttggtggggctgctgcctgttctcaggagccatggcctccagctcagcccaactgccagcaccattcgaagctcagagccaccacgagaacgctcgattggggatgtcaccaccgctccaccggaggtcaccccagagagccgccctgttaatcattccgtcactgatcatggcatgaagccgcgcaaggcctttccagtcctgggcatcgactacacacacgtgcgcacccccttcgagatctccctctggatccttctggcctgcctcatgaagataggtttccatgtgatccccactatctcaagcatcgtcccggagagctgcctgctgatcgtggtggggctgctggtggggggcctgatcaagggtgtaggcgagacaccccccttcctgcagtccgacgtcttcttcctcttcctgctgccgcccatcatcctggatgcgggctacttcctgccactgcggcagttcacagaaaacctgggcaccatcctgatctttgccgtggtgggcacgctgtggaacgccttcttcctgggcggcctcatgtacgccgtgtgcctggtgggcggtgagcagatcaacaacatcggcctcctggacaacctgctcttcggcagcatcatctcggccgtggaccccgtggcggttctggctgtctttgaggaaattcacatcaatgagctgctgcacatccttgtttttggggagtccttgctcaatgacgccgtcactgtggtcctgtatcacctctttgaggagtttgccaactacgaacacgtgggcatcgtggacatcttcctcggcttcctgagcttcttcgtggtggccctgggcggggtgcttgtgggcgtggtctacggggtcatcgcagccttcacctcccgatttacctcccacatccgggtcatcgagccgctcttcgtcttcctctacagctacatggcctacttgtcagccgagctcttccacctgtcaggcatcatggcgctcatagcctcaggagtggtgatgcgcccctatgtggaggccaacatctcccacaagtcccacaccaccatcaaatacttcctgaagatgtggagcagcgtcagcgagaccctcatcttcatcttcctcggcgtctccacggtggccggctcccaccactggaactggaccttcgtcatcagcaccctgctcttctgcctcatcgcccgcgtgctgggggtgctgggcctgacctggttcatcaacaagttccgtatcgtgaagctgacccccaaggaccagttcatcatcgcctatgggggcctgcgaggggccatcgccttctctctgggctacctcctggacaagaagcacttccccatgtgtgacctgttcctcactgccatcatcactgtcatcttcttcaccgtctttgtgcagggcatgaccattcggcccctggtagacctgttggctgtgaagaaaaagcaagagacgaagcgctccatcaacgaagagatccacacacagttcctggaccaccttctgacaggcatcgaagacatctgtggccactacggtcaccaccactggaaggacaagctcaaccggtttaataagaaatatgtgaagaagtgtctgatagctggcgagcgctccaaggagccccagctcattgccttctaccacaagatggagatgaagcaggccatcgagctggtggagagcgggggcatgggcaagatcccctctgccgtctccaccgtctccatgcagaacatccaccccaagtccctgccttccgagcgcatcctgccagcactgtccaaggacaaggaggaggagatccgcaaaatcctgaggaacaacttgcagaagaccaggcagcggctgcggtcctacaacagacacacgctggtggcagacccctacgaggaagcctggaaccagatgctgctccggaggcagaaggcccggcagctggagcagaagatcaacaactacctgacggtgccagcccacaagctggactcacccaccatgtctcgggcccgcatcggctcagacccactggcctatgagccgaaggaggacctgcctgtcatcaccatcgacccggcttccccgcagtcacccgagtctgtggacctggtgaatgaggagctgaagggcaaagtcttagggttgagcccgggatcctgcaaaggtggctgaggaggacgaggacgacgatgggggcatcatgatgcggagcaaggagacttcgtccccaggaaccgacgatgtcttcacccccgcgcccagtgacagccccagctcccagaggatacagcgctgcctcagtgacccaggcccacaccctgagcctggggagggagaaccgttcttccccaaggggcagtaacgccagggccagcaggcagcgcctgtgcccctcacagactcttccaccagagcaggggctgctgggggctccccttgcccttcctgacccggattggccctgcccctccccctaccgcatggcagctgggcccacagcccccaccccagcacagctcctcccctgcttcgctcccgggaagcatcctccccaccagagctgcctccccaatccatttggcagaactgctggggctggtgaggccggccctgcccctccctagatccaggcttcctcccggacctggactagggcctcggaggctcctccctctgcctcatccttcctcctcattcagaccaatcttagtttctaaccaaagagtctctggctcagctgtggtcccacccaggaagggagggagctgaggcctcccttgagtaggccctgctttatcaggggacaaaccaggggtaccaggcacatggctgggggagggactgctgacccaccaaggtctcacactcctcctgccagctctgtcaccctggccaccacccaacctgtccttactcagagctgcgggctgagggcatctctgagtgtctctgcctggagcaggggtggtttctacggtgacagtgacgtgactcagagcttttcgaactgtgctcccacggggaccactgggcccctcaggggaagctgctaggggaaggactggccgtggctccagaatgtgctgcctttttaagttttgtttgttcacactcctatatatgattgtttgcacagagggcgctcctgtttttaaaacattttgaaaacccctggctgaacagtgctctgcctctaactccctcctcacactccagaattacccttcctcatctgtgcctgtctgtccaacccctcccccacgtctctctgcctgctgggctcttaactgttgctcgaagactgtgacatcagaagtaactcccactcctaatcaagagtctctccagcctcacagatgctggcctcttggcacctgcctagctcttgggcctgacctccagtcctgctggcctgctcttacttcccccaccctgggtttggcccctggaacctttcccttgtgtgtaccacaccctgcctgctgtggagcccattgtggaggcggtgggggggagaaggcctcccctgaggatcccctgtcccctggggctggtggattgggcagaatcctgggcccccagagacctttgcccacacacactccttccccttgtccctggggcactcccccaggattgtgcaatagtcagagtgtccctttttgcaggggactgggccatgggtcctcggcccatctgtccatcctcctctccatgcaagtgctgtttgggcaggagtcaccatgcaagggtgacatcgacaaccacgtaccaagccaccgcagctgctgccactctgctgcctgtacagaagaaactgaatctttttcatattctaataaatcaatgtgagtttttaatag

SEQ ID NO: 167 - DNA, 7232 bp, Homo sapiens
  misc_feature: Incyte ID No: 994057.1
  unsure 5602, 5610, 7108: a, t, c, g, or other
cccgagctggcctgcgagttcagggctcctgccgctctccaggagcaacctctactccggacgcacaggcattccccgcgcccctccagccctcgccgccctcgccaccgctcccggccgccgcgctccggtacacacaggatccctgctgggcaccaacagctccaccatggggctggcctggggactaggcgtcctgttcctgatgcatgtgtgtggcaccaaccgcattccagagtctggcggagacaacagcgtgtttgacatctttgaactcaccggggccgcccgcaaggggtctgggcgccgactggtgaagggccccgacccttccagcccagctttccgcatcgaggatgccaacctgatcccccctgtgcctgatgacaagttccaagacctggtggatgctgtgcgggcagaaaagggtttcctccttctggcatccctgaggcagatgaagaagacccggggcacgctgctggccctggagcggaaagaccactctggccaggtcttcagcgtggtgtccaatggcaaggcgggcaccctggacctcagcctgaccgtccaaggaaagcagcacgtggtgtctgtggaagaagctctcctggcaaccggccagtggaagagcatcaccctgtttgtgcaggaagacagggcccagctgtacatcgactgtgaaaagatggagaatgctgagttggacgtccccatccaaagcgtcttcaccagagacctggccagcatcgccagactccgcatcgcaaaggggggcgtcaatgacaatttccagggggtgctgcagaatgtgaggtttgtctttggaaccacaccagaagacatcctcaggaacaaaggctgctccagctctaccagtgtcctcctcacccttgacaacaacgtggtgaatggttccagccctgccatccgcactaactacattggccacaagacaaaggacttgcaagccatctgcggcatctcctgtgatgagctgtccagcatggtcctggaactcaggggcctgcgcaccattgtgaccacgctgcaggacagcatccgcaaagtgactgaagagaacaaagagttggccaatgagctgaggcggcctcccctatgctatcacaacggagttcagtacagaaataacgaggaatggactgttgatagctgcactgagtgtcactgtcagaactcagttaccatctgcaaaaaggtgtcctgccccatcatgccctgctccaatgccacagttcctgatggagaatgctgtcctcgctgttggcccagcgactctgcggacgatggctggtctccatggtccgagtggacctcctgttctacgagctgtggcaatggaattcagcagcgcggccgctcctgcgatacgctcaacaaccgatgtgagggctcctcggtccagacacggacctgccacattcaggagtgtgacaagagatttaaacaggatggtggctggagccactggtccccgtggtcatcttgttctgtgacatgtggtgatggtgtgatcacaaggatccggctctgcaactctcccagcccccagatgaacgggaaaccctgtgaaggcgaagcgcgggagaccaaagcctgcaagaaagacgcctgccccatcaatggaggctggggtccttggtcaccatgggacatctgttctgtcacctgtggaggaggggtacagaaacgtagtcgtctctgcaacaaccccacaccccagtttggaggcaaggactgcgttggtgatgtaacagaaaaccagatctgcaacaagcaggactgtccaattgatggatgcctgtccaatccctgctttgccggcgtgaagtgtactagctaccctgatggcagctggaaatgtggtgcttgtccccctggttacagtggaaatggcatccagtgcacagatgttgatgagtgcaaagaagtgcctgatgcctgcttcaaccacaatggagagcaccggtgtgagaacacggaccccggctacaactgcctgccctgccccccacgcttcaccggctcacagcccttcggccagggtgtcgaacatgccacggccaacaaacaggtgtgcaagccccgtaacccctgcacggatgggacccacgactgcaacaagaacgccaagtgcaactacctgggccactatagcgaccccatgtaccgctgcgagtgcaagcctggctacgctggcaatggcatcatctgcggggaggacacagacctggatggctggcccaatgagaacctggtgtgcgtggccaatgcgacttaccactgcaaaaaggataattgccccaaccttcccaactcagggcaggaagactatgacaaggatggaattggtgatgcctgtgatgatgacgatgacaatgataaaattccagatgacagggacaactgtccattccattacaacccagctcagtatgactatgacagagatgatgtgggagaccgctgtgacaactgtccctacaaccacaacccagatcaggcagacacagacaacaatggggaaggagacgcctgtgctgcagacattgatggagacggtatcctcaatgaacgggacaactgccagtacgtctacaatgtggaccagagagacactgatatggatggggttggagatcagtgtgacaattgccccttggaacacaatccggatcagctggactctgactcagaccgcattggagatacctgtgacaacaatcaggatattgatgaagatggccaccagaacaatctggacaactgtccctatgtgcccaatgccaaccaggctgaccatgacaaagatggcaagggagatgcctgtgaccacgatgatgacaacgatggcattcctgatgacaaggacaactgcagactcgtgcccaatcccgaccagaaggactctgacggcgatggtcgaggtgatgcctgcaaagatgattttgaccatgacagtgtgccagacatcgatgacatctgtcctgagaatgttgacatcagtgagaccgacttccgccgattccagatgattcctctggaccccaaagggacatcccaaaatgaccctaactgggttgtacgccatcagggtaaagaactcgtccagactgtcaactgtgatcctggactcgctgtaggttatgatgagtttaatgctgtggacttcagtggcaccttcttcatcaacaccgaaagggacgatgactatgctggatttgtctttggctaccagtccagcagccgcttttatgttgtgatgtggaagcaagtcacccagtcctactgggacaccaaccccacgagggctcagggatactcgggcctttctgtgaaagttgtaaactccaccacagggcctggcgagcacctgcggaacgccctgtggcacacaggaaacacccctggccaggtgcgcaccctgtggcatgaccctcgtcacataggctggaaagatttcaccgcctacagatggcgtctcagccacaggccaaagacgggtttcattagagtggtgatgtatgaagggaagaaaatcatggctgactcaggacccatctatgataaaacctatgctggtggtagactagggttgtttgtcttctctcaagaaatggtgttcttctctgacctgaaatacgaatgtagagatccctaatcatcaaattgttgattgaaagactgatcataaaccaatgctggtattgcaccttctggaactatgggcttgagaaaacccccaggatcacttctccttggcttccttcttttctgtgcttgcatcagtgtggactcctagaacgtgcgacctgcctcaagaaaatgcagttttcaaaaacagactcagcattcagcctccaatgaataagacatcttccaagcatataaacaattgctttggtttccttttgaaaaagcatctacttgcttcagttgggaaggtgcccattccactctgcctttgtcacagagcagggtgctattgtgaggccatctctgagcagtggactcaaaagcattttcaggcatgtcagagaagggaggactcactagaattagcaaacaaaaccaccctgacatcctccttcaggaacacggggagcagaggccaaagcactaaggggagggcgcatacccgagacgattgtatgaagaaaatatggaggaactgttacatgttcggtactaagtcattttcaggggattgaaagactattgctggatttcatgatgctgactggcgttagctgattaacccatgtaaataggcacttaaatagaagcaggaaagggagacaaagactggcttctggacttcctccctgatccccacccttactcatcacctgcagtggccagaattagggaatcagaatcaaaccagtgtaaggcagtgctggctgccattgcctggtcacattgaaattggtggcttcattctagatgtagcttgtgcagatgtagcaggaaaataggaaaacctaccatctcagtgagcaccagctgcctcccaaaggaggggcagccgtgcttatatttttatggttacaatggcacaaaattattatcaacctaactaaaacattccttttctcttttttcctgaattatcatggagttttctaattctctcttttggaatgtagattttttttaaatgctttacgatgtaaaatatttattttttacttattctggaagatctggctgaaggattattcatggaacaggaagaagcgtaaagactatccatgtcatctttgttgagagtcttcgtgactgtaagattgtaaatacagattatttattaactctgttctgcctggaaatttaggcttcatacggaaagtgtttgagagcaagtagttgacatttatcagcaaatctcttgcaagaacagcacaaggaaaatcagtctaataagctgctctgccccttgtgctcagagtggatgttatgggattctttttttctctgttttatcttttcaagtggaattagttggttatccatttgcaaatgttttaaattgcaaagaaagccatgaggtcttcaatactgttttaccccatcccttgtgcatatttccagggagaaggaaagcatatacacttttttctttcatttttccaaaagagaaaaaaatgacaaaaggtgaaacttacatacaaatattacctcatttgttgtgtgactgagtaaagaatttttggatcaagcggaaagagtttaagtgtctaacaaacttaaagctactgtagtacctaaaaagtcagtgttgtacatagcataaaaactctgcagagaagtattcccaataaggaaatagcattgaaatgttaaatacaatttctgaaagttatgtttttttttctatcatctggtataccattgctttatttttataaattattttctcattgccattggaatagatatctcagattgtgtagatatgctatttaaataatttatcaggaaatactgcctgtagagttagtatttctatttttatataatgtttgcacactgaattgaagaattgttggttttttcttttttttgttttgtttttttntttttttntttttgcttttgacctcccatttttactatttgccaatacctttttctaggaatgtgcttttttttgtacacatttttatccattttacattctaaagcagtgtaagttgtatattactgtttcttatgtacaaggaacaacaataaatcatatggaaatttatatttatacttactgtatccatgcttatttgttctctactggctttatgtcatgaagtatatgcgtaaataccattcataaatcaatatagcatatacaaaaataaattacagtaagtcatagcaacattcacagtttgtatgtgattgagaaagactgagttgctcaggcctaggcttagaatttgctgcgtttgtggaataaaagaacaaaatgatacattagcctgccatatcaaaaacatataaaagagaaattatccctaagtcaagggcccccataagaataaaatttcttattaaggtcattagatgtcattgaatccttttcaaagtgcagtatgaaaacaaagggaaaaacactgaagcacacgcaactctcacagcgacattttctgacccacgaatgatgccttgggtgggcaacacgattgcatgttgtggagacacttcggaagtaaatgtggatgagggaggagctgtccttgcaatgttgagccaagcattacagatacctcctcttgaagaaggaataataagtttaatcaaaaaagaagactaaaaaatgtaaaatttggaaggaatccataaatgcgtgtgtgtctaaatacaaattatcatgtgaagaaaaggcccaagtgtaccaataagcagaccttgatttttggatgggctaattatgaatgtggaatactgaccagttaatttccagttttaatgaaaacagatcaaagaagaaattttatgagtaggttaaaggtctggctttgaggtctattaaacactagaaaggactggctgggtgagataaaatcttccttgttgattttcactctcattctataaatactcatctttctgagtagccatgatcacatacaaatgtaaattgccaaatcattttatagtaccaaggtgaagaagcaggaactagaaagtgttgataatagctgtggagttaggaaaactgatgtgaaggaaataattctttgaaatggcaaagaattaaataccatcattcattatcagaagagttcaacgtttgaagtgctgggagataattctaattcattcttggatagtgaagcaaaactgattgaaaataccaagataagacagaaaaagtgactggaaagaggagcttttcttccaggcatgttccagtttcaccctaagactgaccttcaaataatcaggttgtactgaaataaaggacttgttaaaaattaaaattatgtcatcgagatgatagcttttttcctcctccaacagtttattgtgcatgtgttgtgggagagctcgagtgaagagcaataaactccaggtcttataagantgtacatacaataaaggtggtgccagcagtttttttttttctaaagagtcacatgtagaaaagcctccagtattaagctcctgaattcattcctataaataaattggctctctctctcttctat

SEQ ID NO: 168 - DNA, 3324 bp, Homo sapiens
  misc_feature: Incyte ID No: 197301.4
  unsure 254, 378: a, t, c, g, or other
gtgagaattgtaactcaaggctgcttacacttgagtcggactgtaggcaggttgcttaaggctgcattgtcccagcctccccctccaagtcatctgttccttctgattaatgacagctctgcatgttctctggcccctgcttccccttggaggctgcagagtcaccacattctgtgccctttctgtgttgagcactttgggtctgcaggaggcacatgcacgtccagggactgcttttcagctcctggacaggncaggggcttccttctatcagccactcaactagtgtggcctgcaaacaggaaagggccacagagggtggggggtttgcttagctctcaggagctgacagaagatgggaacatgtacaggagacanttctttcaaatcatctgtgtgaaagcgggtaaccctttgggtatttgcaagtctagagctttaggtgttactggttttaaaggtgtcaggggcagctggggctgcgtaaggtaaggtggcagaggaaaggagtaggtgaatggaacttactcacatcctaagcccacaggttgagaacttctgttcagctccctcaggggtttgcgaggctgcctttgcttttctagccccctaaacgggccccccttctctctacaggtgtttcccattaaacactaccaggacaaaatcaggccttacatccagctgccatcgcacagcaacattactggcattgtggaagtgatccttggggaaaccaaggcctatgtcttctttgagaaggactttggggacatgcactcctatgtgcgaagccggaagaggctgcgggaagaggaagccgcccggctcttcaagcagattgtctccgccgtcgcccactgccaccagtcagccatcgtgctgggggacctgaagcttaggaagttcgtcttctccacggaggagagaacccagcttagactagaaagtctagaagacacacacataatgaagggggaagatgatgctttgtcagacaaacatggctgcccagcctacgtgagccctgagatcctcaacaccactgggacctactccggaaaggctgcggacgtttggagcctgggggtgatgctctacacccttctggttggacgataccccttccatgactcagaccccagtgcccttttctccaaaattcggcgtggacagttctgcattcctgagcacatttcccccaaagccaggtgcctcattcgcagcctcttgagacgggagccctccgagagactcactgcccccgagatcctactgcacccctggtttgagtccgtcttggaacccgggtacatcgactcagaaataggaacttcagaccagattgttccagagtaccaggaggacagtgacattagttccttcttctgctaatccccaaaacctcagaaacctcataattcttaacacctggcatttccatttctaaagatggacaggccctttggcatggtaccaaccagataatgactgcatcaggatgaaagctgctgaactcggcatggcgcctcctcttctctgttgggatgagtgactttattgatttgagcagcatatgctgtgattggctgccctgcaaatttgtttcccttaaggaaccctcaccaactatctctgctggatttgggagttccgcatcttttgtggagggcagagtatggacatcttacacccggtggtcaagtgtgtaataaacttgagcattcgaatgggagaaaaagcaaatcgcacaatgacatattttgagtaataaccgtatttttcacagggtgacaaattgggccaataaatctgccatctttgaactcatctttggtggctagactgctacggcagcttctctgatgggaaagttccttttttggcttaacactcaccctttcttcacactcacatttaccaatgactctgctccgtttttggagcagactgttttaagttgctcaggagcctgatggaaccatgaaccgagactcttctctgtttcctgccaagacctcatctgcactaatgccttctccctgaccttgacacttccccctttagctataaaagcacttaccagccgaacgtggaacagtatcacaaaagattccatctcccaacgatttcagaactctgagctcagagagactccagattttaaaaaataatttgagtgcttggaaactattagctttttaagttccttccaaatatgttagtacctaccctttactttttccccaagaccatctcagggtggagcattctgtctaagagaagaaagataaggaggctcccacccacctctcccaagagcagacattaaacatctttgtgctttgaagagagtgaattttggatagtcttgtgattctcagactaacttccagaattatactttaacccctcccagatatggtccgcctttggcattgtgtgtacatctgcagttttgcatggtgggttgttaatatttcaaatgtgtggtttatgaatacgtctgtataatcggcttctggagtgaaacagcaaaccccaaatcttcaaagttggaaggaactttaaaaatcatccggtccaatctctttcctctttctgccacctcccaaggcagaaatcccctcttcagcttcttttgtaggtgggaatccagcctctgttagatatgtccagagatggaaactcactcccctacaaaagatggagcttaatggagaaattgcaactttcattaaaaaacaaattcagatgaaatatcagtaactgtcttggacagtgctgaaatcaggtggttaaacgggtaaacaaaatatactgtattttgagaaatggcacaaaaacaggcagtcatctttaagggctatgcctaggcaaactactaacatgcattgtgagaatgccgtgtatacctcacgtactgtgtactttgtacatatattttaccttttatacctatgttcgattttgttttgttttgttttgttctggctttgaggcttgttttgttgtctgtgtctgtctgaataacctgcgtgtctaaaaccacgtgaaatgtgaatgattattggcaatattaccttgacagaatcatgggactttgagaagagggaggacagaggcctctgtcgcactaacgctctcgtggttgctcgactgttgtatctgtgatacattatccgactaaggactctgggctggcagggccttctgccgggaaagctagaaacactaggttcttcctgtacatacgtgtatatatgtgaacagtgagatggccgtttctgacttgtagagaaattttaataaacctggtttcgt

SEQ ID NO: 169 - DNA, 2412 bp, Homo sapiens
  misc_feature: Incyte ID No: 476016.17
  unsure 60, 70, 82, 104, 1750, 2165-2228: a, t, c, g, or other
gaggacgaagccagttctctttttctggtctgactggcttggaaattccccgagcctgancccgccccanagaaatccccanccagcgtttatagggcgccgcngcggcgctgcagagcccacagcagtccgtgccgccgtcccgcccgccagcgccccagcgaggaagcagcgcgcagcccgcggcccagcgcacccgcagcagcgcccgcagctcgtccgcgccatgttccaggcggccgagcgcccccaggagtgggccatggagggcccccgcgacgggctgaagaaggagcggctactggacgaccgccacgacagcggcctggactccatgaaagacgaggagtacgagcagatggtcaaggagctgcaggagatccgcctcgagccgcaggaggtgccgcgcggctcggagccctggaagcagcagctcaccgaggacggggactcgttcctgcacttggccatcatccatgaagaaaaggcactgaccatggaagtgatccgccaggtgaagggagacctggccttcctcaacttccagaacaacctgcagcagactccactccacttggctgtgatcaccaaccagccagaaattgctgaggcacttctgggagctggctgtgatcctgagctccgagactttcgaggaaatacccccctacaccttgcctgtgagcagggctgcctggccagcgtgggagtcctgactcagtcctgcaccaccccgcacctccactccatcctgaaggctaccaactacaatggccacacgtgtctacacttagcctctatccatggctacctgggcatcgtggagcttttggtgtccttgggtgctgatgtcaatgctcaggagccctgtaatggccggactgcccttcacctcgcagtggacctgcaaaatcctgacctggtgtcactcctgttgaagtgtggggctgatgtcaacagagttacctaccagggctattctccctaccagctcacctggggccgcccaagcacccggatacagcagcagctgggccagctgacactagaaaaccttcagatgctgccagagagtgaggatgaggagagctatgacacagagtcagagttcacggagttcacagaggacgagctgccctatgatgactgtgtgtttggaggccagcgtctgacgttatgagcgcaaaggggctgaaagaacatggacttgtatatttgtacaaaaaaaaagttttatttttctaaaaaaagaaaaaagaagaaaaaatttaaagggtgtacttatatccacactgcacactgcctggcccaaaacgtcttattgtggtaggatcagccctcattttgttgcttttgtgaactttttgtaggggacgagaaagatcattgaaattctgagaaaacttcttttaaacctcacctttgtggggtttttggagaaggttatcaaaaatttcatggaaggaccacattttatatttattgtgcttcgagtgactgaccccagtggtatcctgtgacatgtaacagccaggagtgttaagcgttcagtgatgtggggtgaaaagttactacctgtcaaggtttgtgttaccctcctgtaaatggtgtacataatgtattgttggtaattattttggtacttttatgatgtatatttattaaacagatttttacaaatgagttatcctgatcattttcttcaggctgccgtgggcctccggttctgaagttccatcctccggcagangtggaggtggagcagtgtgagggaggaggtaactcccagcagcttctcacacctgacacccagcctccagcaaagctttgcaggcaccctgggcccagtgtgtgggagggaggctgttgcaaggttataggaaattaccaatctcaggcttggggtggaagcatgctgtttggcctgtggttggagacctctccattgtcattctgtcatcccgttgatttaaacttcctggaccctaattgccagttgaggaaattattttggccaagaagaatatgctgaattcatatagagctgggaaagatctcactaatacaggaagttcctaaggacataggctcagaaatgggactgcactgacatttgttagcagatgctcacctactgagcctcagttttctcatttattagctgnnnnnnnnnnnnnnnnnnnnnnnnnnnnnnnnnnnnnnnnnnnnnnnnnnnnnnnnnnnnnnnntgctaaagaaaaacaagctgttacgcaacgttctttatgtcataccaggagaaacaagtccagagagaatgtcctgtctagggtcaccttgcaggagaaataggtggttaacatatttcatacgtgctcgtttaggggtaaacatcttttaagagcatccatctcttaaatctatgtgttattg

SEQ ID NO: 170 - DNA, 2980 bp, Homo sapiens
  misc_feature: Incyte ID No: 1098409.1
gagcaattgattaatagctcggcgaggggactcactgactgttataataacactacaccagcaactcctggcttcccagcagccggaacacagacaggagagagtcagtggcaaatagacatttttcttatttcttaaaaaacagcaacttgtttgctacttttatttctgttgatttttttttcttggtgtgtgtggtggttgtttttaagtgtggagggcaaaaggagataccatcccaggctcagtccaacccctctccaaaacggcttttctgacactccaggtagcgagggagttgggtctccaggttgtgcgaggagcaaatgatgaccgccaaggccgtagacaaaatcccagtaactctcagtggttttgtgcaccagctgtctgacaacatctacccggtggaggacctcgccgccacgtcggtgaccatctttcccaatgccgaactgggaggcccctttgaccagatgaacggagtggccggagatggcatgatcaacattgacatgactggagagaagaggtcgttggatctcccatatcccagcagctttgctcccgtctctgcacctagaaaccagaccttcacttacatgggcaagttctccattgaccctcagtaccctggtgccagctgctacccagaaggcataatcaatattgtgagtgcaggcatcttgcaaggggtcacttccccagcttcaaccacagcctcatccagcgtcacctctgcctcccccaacccactggccacaggacccctgggtgtgtgcaccatgtcccagacccagcctgacctggaccacctgtactctccgccaccgcctcctcctccttattctggctgtgcaggagacctctaccaggacccttctgcgttcctgtcagcagccaccacctccacctcttcctctctggcctacccaccacctccttcctatccatcccccaagccagccacggacccaggtctcttcccaatgatcccagactatcctggattctttccatctcagtgccagagagacctacatggtacagctggcccagaccgtaagccctttccctgcccactggacaccctgcgggtgccccctccactcactccactctctacaatccgtaactttaccctggggggccccagtgctggggtgaccggaccaggggccagtggaggcagcgagggaccccggctgcctggtagcagcttcaagcagcaagcagcagccgccgccgccgccgcctataacccacaccacctgccactgcggcccattctgaggcctcgcaagtaccccaacagacccagcaagacgccggtgcacgagaggccctacccgtgcccagcagaaggctgcgaccggcggttctcccgctctgacgagctgacacggcacatccgaatccacactgggcataagcccttccagtgtcggatctgcatgcgcaacttcagccgcagtgaccacctcaccacccatatccgcacccacaccggtgagaagcccttcgcctgtgactactgtggccgaaagtttgcccggagtgatgagaggaagcgccacaccaagatccacctgagacagaaagagcggaaaagcagtgccccctctgcatcggtgccagccccctctacagcctcctgctctgggggcgtgcagcctgggggtaccctgtgcagcagtaacagcagcagtcttggcggagggccgctcgccccttgctcctctcggacccggacaccttgagatgagactcaggctgatacaccagctcccaaaggtcccggaggccctttgtccactggagctgcacaacaaacactaccaccctttcctgtccctctctccctttgttgggcaaagggctttggtggagctagcactgccccctttccacctagaagcaggttcttcctaaaacttagcccattctagtctctcttaggtgagttgactatcaacccaaggcaaaggggaggctcagaaggaggtggtgtggggacccctggccaagagggctgaggtctgaccctgctttaaagggttgtttgactaggttttgctaccccacttccccttattttgacccatcacaggtttttgaccctggatgtcagagttgatctaagacgttttctacaataggttgggagatgctgatcccttcaagtggggacagcaaaaagacaagcaaaactgatgtgcactttatggcttgggactgatttgggggacattgtacagtgagtgaagtatagcctttatgccacactctgtggccctaaaatggtgaatcagagcatatctagttgtctcaacccttgaagcaatatgtattataaactcagagaacagaagtgcaatgtgatgggaggaacatagcaatatctgctccttttcgagttgtttgagaaatgtaggctattttttcagtgtatatccactcagattttgtgtatttttgatgtacactgttctctaaattctgaatctttgggaaaaaatgtaaagcatttatgatctcagaggttaacttatttaagggggatgtacatatattctctgaaactaggatgcatgcaattgtgttggaagtgtccttggtgccttgtgtgatgtagacaatgttacaaggtctgcatgtaaatgggttgccttattatggagaaaaaaatcactccctgagtttagtatggctgtatatttctgcctattaatatttggaattttttttagaaagtatatttttgtatgctttgttttgtgacttaaaagtgttacctttgtagtcaaatttcagataagaatgtacataatgttaccggagctgatttgtttggtcattagctcttaatagttgtgaaaaaataaatctattctaacgcaaaaccactaactgaagttcagataatggatggtttgtgactatagtgtaaataaatacttttcaacaacaaaaaaagaat

SEQ ID NO: 171 - DNA, 5240 bp, Homo sapiens
  misc_feature: Incyte ID No: 202023.6
gcctggtcccctatcgcctccgcctagcagctgccatcggtgcgcccccacagctctaggaccaataggcaggccctagtgctgggactcgaacggctattggttggccgagccgtggtgagagatggtgcggtgcctgttcttggccctgcagagagctgtgggcggttgttaaggcgaccgttcgtgacgtagcgccgtcaggccgagcagcccccaggcgattggctagacaatcgaacgatcctctcttattggtcgaaggctcgtccagctccgagcgtgcgtaaggtgagggctccttccgctccgcgactgcgttaactggagccaggctgagcgtcggcgccggggttcggtggcctctagtgagatctggaggatccaaggattctgtagctacaatgttgtcaagactttttcgaatgcatggcctctttgtggcctcccatccctgggaagtcatagtggggacagtgacactgaccatctgcatgatgtccatgaacatgtttactggtaacaataagatctgtggttggaattatgaatgtccaaagtttgaagaggatgttttgagcagtgacattataattctgacaataacacgatgcatagccatcctgtatatttacttccagttccagaatttacgtcaacttggatcaaaatatattttgggtattgctggccttttcacaattttctcaagttttgtattcagtacagttgtcattcacttcttagacaaagaattgacaggcttgaatgaagctttgccctttttcctacttttgattgacctttccagagcaagcacattagcaaagtttgccctcagttccaactcacaggatgaagtaagggaaaatattgctcgtggaatggcaattttaggtcctacgtttaccctcgatgctcttgttgaatgtcttgtgattggagttggtaccatgtcaggggtacgtcagcttgaaattatgtgctgctttggctgcatgtcagttcttgccaactacttcgtgttcatgactttcttcccagcttgtgtgtccttggtattagagctttctcgggaaagccgcgagggtcgtccaatttggcagctcagccattttgcccgagttttagaagaagaagaaaataagccgaatcctgtaactcagagggtcaagatgattatgtctctaggcttggttcttgttcatgctcacagtcgctggatagctgatccttctcctcaaaacagtacagcagatacttctaaggtttcattaggactggatgaaaatgtgtccaagagaattgaaccaagtgtttccctctggcagttttatctctctaaaatgatcagcatggatattgaacaagttattaccctaagtttagctctccttctggctgtcaagtacatcttctttgaacaaacagagacagaatctacactctcattaaaaaaccctatcacatctcctgtagtgacacaaaagaaagtcccagacaattgttgtagacgtgaacctatgctggtcagaaataaccagaaatgtgattcagtagaggaagagacagggataaaccgagaaagaaaagttgaggttataaaacccttagtggctgaaacagataccccaaacagagctacatttgtggttggtaactcctccttactcgatacttcatcagtactggtgacacaggaacctgaaattgaacttcccagggaacctcggcctaatgaagaatgtctacagatacttgggaatgcagagaaaggtgcaaaattccttagtgatgctgagatcatccagttagtcaatgctaagcatatcccagcctacaagttggaaactctgatggaaactcatgagcgtggtgtatctattcgccgacagttactttccaagaagctttcagaaccttcttctctccagtacctaccttacagggattataattactccttggtgatgggagcttgttgtgagaatgttattggatatatgcccatccctgttggagtggcaggacccctttgcttagatgaaaaagaatttcaggttccaatggcaacaacagaaggttgtcttgtggccagcaccaatagaggctgcagagcaataggtcttggtggaggtgccagcagccgagtccttgcagatgggatgactcgtggcccagttgtgcgtcttccacgtgcttgtgactctgcagaagtgaaagcctggctcgaaacatctgaagggttcgcagtgataaaggaggcatttgacagcactagcagatttgcacgtctacagaaacttcatacaagtatagctggacgcaacctttatatccgtttccagtccaggtcaggggatgccatggggatgaacatgatttcaaagggtacagagaaagcactttcaaaacttcacgagtatttccctgaaatgcagattctagccgttagtggtaactattgtactgacaagaaacctgctgctataaattggatagagggaagaggaaaatctgttgtttgtgaagctgtcattccagccaaggttgtcagagaagtattaaagactaccacagaggctatgattgaggtcaacattaacaagaatttagtgggctctgccatggctgggagcataggaggctacaacgcccatgcagcaaacattgtcaccgccatctacattgcctgtggacaggatgcagcacagaatgttggtagttcaaactgtattactttaatggaagcaagtggtcccacaaatgaagatttatatatcagctgcaccatgccatctatagagataggaacggtgggtggtgggaccaacctactacctcagcaagcctgtttgcagatgctaggtgttcaaggagcatgcaaagataatcctggggaaaatgcccggcagcttgcccgaattgtgtgtgggaccgtaatggctggggaattgtcacttatggcagcattggcagcaggacatcttgtcaaaagtcacatgattcacaacaggtcgaagatcaatttacaagacctccaaggagcttgcaccaagaagacagcctgaatagcccgacagttctgaactggaacatgggcattgggttctaaaggactaacataaaatctgtgaattaaaaaagctcaatgcattgtcttgtggaggatgaatagatgtgatcactgagacagccacttggtttttggctctttcagagaggtctcaggttctttccatgcagactcctcagatctgaacacagtttagtgctttacatgctgtgctctttgaagagatttcaacaagaatattgtatgttaaagcatcagagatggtaatctacagctcacctctgaaggcaaatataagctgggaaaaaagttttgatgaaattcttgaagttcatggtgatcagtgcaattgaccttctccctcacccctgccagttgaaaatggatttttaaattatactgtagctgatgaaactcctgattttgtagttaatttattaagtctgggatgtagaacttcaagaagtaagagctaagttctaagttcatgtttgtaaattaatacttcatttggtgctggtctattttgattttggggggtaatcagcattattcttcagaaggggacctgttttcttcaagggaagaaacactcttattcccaaactacagaataatgtgttaaacatgctaaatagttctatcaggaaaacaaatcactgtatttatctccgcaggctatttgttcagagaggccttttgtttaaatataaatgtttaaatataaatgtttgtctggattggctataacatgtctttcagcattaggcttttaagaaacacagggttttgtattctttactaaagatatcagagctcttaatgttgcttagatgagggtgactgtcaagtacaagcaagactgggaccttagaaatcattgtagaaacacagttttgaaagaaaaataccatgtctctaagccaactttaattgcttaaaagacatttttatttagttgaaaaatctagttttttttgtaaactgtatcaaatctgtatatgttgtaataaaacttatgctagtttattggaagtgttcaagaaataaaaatcaacttgtgtactgataaaatactctagcctgggccagagaagataatgttctttaatgttgtccaggaaaccctggcttgcttgccgagcctaatgaaagggaaagtcagctttcagagccagtgaaggagccacgtgaatggccctagaactgtgcctagttcctgtggccaggaggttggtgactgaaacattcacacagggctctttgatggacccacgaacgctcttagctttctcagggggtcagcagagttattgaatcttaattttttttaatgtacaagttttgtataaataataaagaactccttattttgtattacatctaatgcttcaagtgttgctcttggaaagctgatgatgtctcttgtagaagatggactctgaaaaacattccaggaaaccatggcagcatggagagcctcttagtgattgtgtctgcattgttattgtggaagatttaccttttctgttgtacgtaaagcttaaattgcttttgttgtgactttttagccagtgactttttctgagcttttcatggaagtggcagtgaaaaatatgttgagtgttcattttagtgactgtaattaatatcttgctggattaatgttttgtacaattactaaattgtatacattttgttatagaatacttttttctagtttcagtaaataatgaaaaggaagtgctgagggtctgagaggggagatgcatgcgtgtccaggctgaagatgcccctatattctgtcaaaggttggcggggggaggtgttggggtcctttcatctggctccgtttctggtgcttcttgctaaccaggccgagaggccacacacttgcccccccatccccacaaaccaggtaatgccagtttgccagcagctatttgcctatagagatgagtctgtcctggtcataactgtgtgctcaaggtgtccaggcttttgggcgtgggcctatctgggtgcattatggatggtttggtggattgaggtgtggggaggagggtcctaggctagagggggtatccctagttagactttgggaagccaccttcaaagttttatttttttatttgtacctgccttgttccagaaaacgttgaag

SEQ ID NO: 172 - DNA, 2097 bp, Homo sapiens
  misc_feature: Incyte ID No: 350423.5
ggggcgtcgccgtactaggcctgccccctgtccggccagcccctcgaagcacctactccacaggtccagccggccggtgagcgcctggggaccgcagaggtgagagtcgcgcccggggagtccgccgcctgcgccaggatggagttcgtgaaatgccttgggccaccccgaagagttctacaacctggtgcgcttccggatcgggggcaagcggaaggtgatgcccaagatggaccaggactcgctcagcagcagcctgaaaacttgctacaagtatctcaatcagaccagtcgcagtttcgcagctgttatccaggcgctggatggggaaatgcgcaacgcagtgtggcatattttatctggttctccgagctctggacacactggaagatgacatgaccatcagtgtggaaaagaaggtcccgctgttacacaactttcactctttcctttaccaaccagactggcggttcatggagagcaaggagaaggatcgccaggtgctggaggacttcccaacgatctcccttgagtttagaaatctggctgagaaataccaaacagtgattgccgacatttgccggagaatgggcattgggatggcagagtttttggataagcatgtgacctctgaacaggagtgggacaagtactgccactatgttgctgggctggtcggaattggcctttcccgtcttttctcagcctcagagtttgaagaccccttagttggtgaagatacagaacgtgccaactctatgggcctgtttctgcagaaaacaaacatcatccgtgactatctggaagaccagcaaggaggaagagagttctggcctcaagaggtttggagcaggtatgttaagaagttaggggattttgctaagccggagaatattgacttggccgtgcagtgcctgaatgaacttataaccaatgcactgcaccacatcccagatgtcatcacctacctttcgagactcagaaaccagagtgtgtttaacttctgtgctattccacaggtgatggccattgccactttggctgcctgttataataaccagcaggtgttcaaaggggcagtgaagattcggaaagggcaagcagtgaccctcatgatggatgccaccaatatgccagctgtcaaagccatcatatatcagtatatggaagagatttatcatagaatccccgactcagacccatcttctagcaaaacaaggcagatcatctccaccatccggacgcagaatcttcccaactgtcagctgatttcccgaagccactactcccccatctacctgtcgtttgtcatgcttttggctgccctgagctggcagtacctgaccactctctcccaggtaacagaagactatgttcagactggagaacactgatcccaaatttgtccatagctgaagtccaccataaagtggatttactttttttctttaaggatggatgttgtgttctctttatttttttcctactactttaatccctaaaagaacgctgtgtggctgggacctttaggaaagtgaaatgcaggtgagaagaacctaaacatgaaaggaaagggtgcctcatcccagcaacctgtccttgtgggtgatgatcactgtgctgcttgtggctcatggcagagcattcagtgccacggtttaggtgaagtcgctgcatatgtgactgtcatgagatcctacttagtatgatcctggctagaatgataattaaaagtatttaatttgaagcaccatttgaatgttcgtaatagtagaaaatgatgtgaattttctttctgttcggctcctatttttctcatcattttgttttctttaattgggttgaatggagtagatagaaatatttatggtttaggtaacagttagatgtttcctaagaatgcaaactgccttttccacacaaaggctgggaataaaattctgggtattctcgtattctcatttaaaggagtttagctttcagagagaaacagcaggattgcttttgaccttttagaagattggtctccagtaaaggtggacatttttgagatttttataataaagaatttaattgctctgcatttgtcaagtaaaa

SEQ ID NO: 173 - DNA, 3169 bp, Homo sapiens
  misc_feature: Incyte ID No: 1100023.1
  unsure 2469-2773: a, t, c, g, or other
gctgggtttagtaggagacctggggcaaggccccctgtggacgaccatctgccagcttctctcgttccgtcgattgggaggagcggtggcgacctcggccttcagtgtttccgacggagtgaatggcggcggcggctgggatgctgctgctgggcttgctgcaggcgggtgggtcggtgctgggccaggcgatggagaaggtgacaggcggcaacctcttgtccatgctgctgatcgcctgcgccttcaccctcagcctggtctacctgatccgtctggccgccggccacctggtccagctgcccgcaggggtgaaaagtcctccatacattttctccccaattccattccttgggcatgccatagcatttgggaaaagtccaattgaatttctagaaaatgcatatgagaagtatggacctgtatttagttttaccatggtaggcaagacatttacttaccttctggggagtgatgctgctgcactgctttttaatagtaaaaatgaagacctgaatgcagaagatgtctacagtcgcctgacaacacctgtgtttgggaagggagttgcatacgatgtgcctaatccagttttcttggagcagaagaaaatgttaaaaagtggccttaacatagcccactttaaacagcatgtttctataattgaaaaagaaacaaaggaatactttgagagttggggagaaagtggagaaaaaaatgtgtttgaagctctttctgagctcataattttaacagctagccattgtttgcatggaaaggaaatcagaagtcaactcaatgaaaaggtagcacagctgtatgcagatttggatggaggtttcagccatgcagcctggctcttaccaggttggctgcctttgcctagtttcagacgcagggacagagctcatcgggaaatcaaggatattttctataaggcaatccagaaacgcagacagtctcaagaaaaaattgatgacattctccaaactttactagatgctacatacaaggatgggcgtcctttgactgatgatgaagtagcagggatgcttattggattactcttggcagggcagcatacatcctcaactactagtgcttggatgggcttctttttggccagagacaaaacacttcaaaaaaaatgttatttagaacagaaaacagtctgtggagagaatctgcctcctttaacttatgaccagctcaaggatctaaatttacttgatcgctgtataaaagaaacattaagacttagacctcctataatgatcatgatgagaatggccagaactcctcagactgtggcagggtataccattcctccaggacatcaggtgtgtgtttctcccactgtcaatcaaagacttaaagactcatgggtagaacgcctggactttaatcctgatcgctacttacaggataacccagcatcaggggaaaagtttgcctatgtgccatttggagctgggcgtcatcgttgtattggggaaaattttgcctatgttcaaattaagacaatttggtccactatgcttcgtttatatgaatttgatctcattgatggatactttcccactgtgaattatacaactatgattcacacccctgagaacccagttatccgttacaaacgaagatcaaaatgaaaaaggttgcaaggaacgaatatatgtgattatcactgtaagccacaaaggcattcgaagagaatgaagtgtacaaaacaactcttgtagtttactgtttttttaagtgtgtaattctaaaagccagtttatgatttaggattttgttaactgaatggttctatcaaatataatagcatttgacacattttctaatagttatgatacttatacatgtgctttcaggaagttccttggtgaaacaattgttgaggggggatctaggtaattggcagattctaaataatataatttccagatagtaattttaagagtactcatcgctcttgccaaataagttcagggtattcaaatcttggactagtcctgcaaggtataaagaataaaaatcccagtgagatacttggaaaccacagtttattattatttatctgggcaattattgtgtgtgtgaggatggaagggtagggaataatcgaacatctaaagccttgaataagagaatactaattgttttggtatgatgatactcagaaatggaggatattataggaaaaagaaatcctttggaattttaactaaaatcactgcatatgggaaattaagagatccaggaccatatttgataagagttcctaaaaataatgtaattattaatgctaaagactgctcatgtatcttgatctaattactaaataaattacatatttatttacctgataaatatgtatctagttctacaaggtcacatttatgtggaagtccaaagtcaagtccttaggggataattttgttttgggctcagttgttccctgcnnnnnnnnnnnnnnnnnnnnnnnnnnnnnnnnnnnnnnnnnnnnnnnnnnnnnnnnnnnnnnnnnnnnnnnnnnnnnnnnnnnnnnnnnnnnnnnnnnnnnnnnnnnnnnnnnnnnnnnnnnnnnnnnnnnnnnnnnnnnnnnnnnnnnnnnnnnnnnnnnnnnnnnnnnnnnnnnnnnnnnnnnnnnnnnnnnnnnnnnnnnnnnnnnnnnnnnnnnnnnnnnnnnnnnnnnnnnnnnnnnnnnnnnnnnnnnnnnnnnnnnnnnnnnnnnnnnnnnnnnnnnnnnnnnnnnnnnnnnnnnnnnttccctgcttcctctctagaatccaattagggatgtttgttactactcatattgattaaaacagttaacaaacttttttctttttaaaatgtgagatcagtgaactctggttttaagataatctgaaacaaggtccttgggagtaataaaattggtcacattctgtaaagcacattctgtttaggaatcaacttatctcaaattgtaactcggggcctaactatatgagatggctgaaaaaataccacatcgtctgttttcactaggtgatgccaaaatattttgctttatgtatattacagttctttttaaaacactggaagactcatgttaaactctaattgtgaaggcagaatctctgctaatttttcagattaaaattctctttgaaaaaat

SEQ ID NO: 174 - DNA, 502 bp, Homo sapiens
  misc_feature: Incyte ID No: 414196.8
  unsure 371, 394, 409, 420, 446, 448, 458: a, t, c, g, or other
aaccctctctcctcagcgcttcttctttcttggtttgctcccagatcctgactgctgtcatggcgtgccctctggagaaggccctggatgtgatggtgtccaccttccacaagtactcgggcaaagagggtgacaagttcaagctcaacaagtcagaactaaaggagctgctgacccgggagctgcccagcttcttggggaaaaggacagatgaagctgctttccagaagctgatgagcaacttggacagcaacagggacaacgaggtggacttccaagagtactgtgtcttcctgtcctgcatcgccatgatgtgtaacgaattctttgaaggcttcccagataagcagcccagggagaaatgaaaactnctctgatgtggttggggggtctnccagctggggccctncctgtcgccantgggcactttttttttccaccctggntncttcagacangtgcttgatgctgagcaagttcaataaagattcttggaagtttt

SEQ ID NO: 175 - DNA, 5762 bp, Homo sapiens
  misc_feature: Incyte ID No: 331106.6
gcgcgaccgtcccgggggtggggccgggcgcagcggcgagaggaggcgaaggtggctgcggtagcagcagcgcggcagcctcgtgacccagcccggagcgcagggcggccgctgcaggtccccgctcccctccccgtgcgtccgcccatggccgccgccgggcagctgtgcttgctctacctgtcggcggggctcctgtcccggctcggcgcagccttcaacttggacactcgggaggacaacgtgatccggaaatatggagaccccgggagcctcttcggcttctcgctggccatgcactggcaactgcagcccgaggacaagcggctgttgctcgtgggggccccgcgggcagaagcgcttccactgcagagagccaacagaacgggagggctgtacagctgcgacatcaccgcccgggggccatgcacgcggatcgagtttgataacgatgctgaccccacgtcagaaagcaaggaagatcagtggatgggggtcaccgtccagagccaaggtccagggggcaaggtcgtgacatgtgctcaccgatatgaaaaaaggcagcatgttaatacgaagcaggaatcccgagacatctttgggcggtgttatgtcctgagtcagaatctcaggattgaagacgatatggatgggggagattggagcttttgtgatgggcgattgagaggccatgagaaatttggctcttgccagcaaggtgtagcagctacttttactaaagactttcattacattgtatttggagccccgggtacttataactggaaagggattgttcgtgtagagcaaaagaataacactttttttgacatgaacatctttgaagatgggccttatgaagttggtggagagactgagcatgatgaaagtctcgttcctgttcctgctaacagttacttaggtttttctttggactcagggaaaggtattgtttctaaagatgagatcacttttgtatctggtgctcccagagccaatcacagtggagccgtggttttgctgaagagagacatgaagtctgcacatctcctccctgagcacatattcgatggagaaggtctggcctcttcatttggctatgatgtggcggtggtggacctcaacaaggatgggtggcaagatatagttattggagccccacagtattttgatagagatggagaagttggaggtgcagtgtatgtctacatgaaccagcaaggcagatggaataatgtgaagccaattcgtcttaatggaaccaaagattctatgtttggcattgcagtaaaaaatattggagatattaatcaagatggctacccagatattgcagttggagctccgtatgatgacttgggaaaggtttttatctatcatggatctgcaaatggaataaataccaaaccaacacaggttctcaagggtatatcaccttattttggatattcaattgctggaaacatggaccttgatcgaaattcctaccctgatgttgctgttggttccctctcagattcagtaactattttcagatcccggcctgtgattaatattcagaaaaccatcacagtaactcctaacagaattgacctccgccagaaaacagcgtgtggggcgcctagtgggatatgcctccaggttaaatcctgttttgaatatactgctaaccccgctggttataatccttcaatatcaattgtgggcacacttgaagctgaaaaagaaagaagaaaatctgggctatcctcaagagttcagtttcgaaaccaaggttctgagcccaaatatactcaagaactaactctgaagaggcagaaacagaaagtgtgcatggaggaaaccctgtggctacaggataatatcagagataaactgcgtcccattcccataactgcctcagtggagatccaagagccaagctctcgtaggcgagtgaattcacttccagaagttcttccaattctgaattcagatgaacccaagacagctcatattgatgttcacttcttaaaagagggatgtggagacgacaatgtatgtaacagcaaccttaaactagaatataaattttgcacccgagaaggaaatcaagacaaattttcttatttaccaattcaaaaaggtgtaccagaactagttctaaaagatcagaaggatattgctttagaaataacagtgacaaacagcccttccaacccaaggaatcccacaaaagatggcgatgacgcccatgaggctaaactgattgcaacgtttccagacactttaacctattctgcatatagagaactgagggctttccctgagaaacagttgagttgtgttgccaaccagaatggctcgcaagctgactgtgagctcggaaatccttttaaaagaaattcaaatgtcactttttatttggttttaagtacaactgaagtcacctttgacaccccagatctggatattaatctgaagttagaaacaacaagcaatcaagataatttggctccaattacagctaaagcaaaagtggttattgaactgcttttatcggtctcgggagttgctaaaccttcccaggtgtattttggaggtacagttgttggcgagcaagctatgaaatctgaagatgaagtgggaagtttaatagagtatgaattcagggtaataaacttaggtaaacctcttacaaacctcggcacagcaaccttgaacattcagtggccaaaagaaattagcaatgggaaatggttgctttatttggtgaaagtagaatccaaaggattggaaaaggtaacttgtgagccacaaaaggagataaactccctgaacctaacggagtctcacaactcaagaaagaaacgggaaattactgaaaaacagatagatgataacagaaaattttctttatttgctgaaagaaaataccagactcttaactgtagcgtgaacgtgaactgtgtgaacatcagatgcccgctgcgggggctggacagcaaggcgtctcttattttgcgctcgaggttatggaacagcacatttctagaggaatattccaaactgaactacttggacattctcatgcgagccttcattgatgtgactgctgctgccgaaaatatcaggctgccaaatgcaggcactcaggttcgagtgactgtgtttccctcaaagactgtagctcagtattcgggagtaccttggtggatcatcctagtggctattctcgctgggatcttgatgcttgctttattagtgtttatactatggaagtgtggtttcttcaagagaaataagaaagatcattatgatgccacatatcacaaggctgagatccatgctcagccatctgataaagagaggcttacttctgatgcatagtattgatctacttctgtaattgtgtggattctttaaacgctctaggtacgatgacagtgttccccgataccatgctgtaaggatccggaaagaagagcgagagatcaaagatgaaaagtatattgataaccttgaaaaaaaacagtggatcacaaagtggaacagaaatgaaagctactcatagcgggggcctaaaaaaaaaaaaagcttcacagtacccaaactgctttttccaactcagaaattcaatttggatttaaaagcctgctcaatccctgaggactgatttcagagtgactacacacagtacgaacctacagttttaactgtggatattgttacgtagcctaaggctcctgttttgcacagccaaatttaaaactgttggaatggatttttctttaactgccgtaatttaactttctgggttgcctttgtttttggcgtggctgacttacatcatgtgttggggaagggcctgcccagttgcactcaggtgacatcctccagatagtgtagctgaggaggcacctacactcacctgcactaacagagtggccgtcctaacctcgggcctgctgcgcagacgtccatcacgttagctgtcccacatcacaagactatgccattggggtagttgtgtttcaacggaaagtgctgtcttaaactaaatgtgcaatagaaggtgatgttgccatcctaccgtcttttcctgtttcctagctgtgtgaatacctgctcacgtcaaatgcatacaagtttcattctccctttcactaaaaacacacaggtgcaacagacttgaatgctagttatacttatttgtatatggtatttattttttcttttctttacaaaccattttgttattgactaacaggccaaagagtctccagtttacccttcaggttggtttaatcaatcagaattagaattagagcatgggaggtcatcactttgacctaaattatttactgcaaaaagaaaatctttataaatgtaccagagagagttgttttaataacttatctataaactataacctctccttcatgacagcctccaccccacaacccaaaaggtttaagaaatagaattataactgtaaagatgtttatttcaggcattggatattttttactttagaagcctgcataatgtttctggatttcatactgtaacattcaggaattcttggagaaaatgggtttattcactgaactctagtgcggtttactcactgctgcaaatactgtatattcaggacttgaaagaaatggtgaatgcctatggtggatccaaactgatccagtataagactactgaatctgctaccaaaacagttaatcagtgagtcgatgttctattttttgttttgtttcctcccctatctgtattcccaaaaattactttggggctaatttaacaagaactttaaattgtgttttaattgtaaaaatggcagggggtggaattattactctatacattcaacagagactgaatagatatgaaagctgattttttttaattaccatgcttcacaatgttaagttatatggggagcaacagcaaacaggtgctaatttgttttggatatagtataagcagtgtctgtgttttgaaagaatagaacacagtttgtagtgccactgttgttttgggggggcttttttcttttcggaaatcttaaaccttaagatactaaggacgttgttttggttgtactttggaattcttagtcacaaaatatattttgtttacaaaaatttctgtaaaacaggttataacagtgtttaaagtctcagtttcttgcttggggaacttgtgtccctaatgtgtttagattgctagattgctaaggagctgatactttgacagtgtttttagacctgtgttactaaaaaaaagatgaatgtcctgaaaagggtgttgggagggtggttcaacaaagaaacaaagatgttatggtgtttagatttatggttgttaaaaatgtcatctcaagtcaagtcactggtctgtttgcatttgatacatttttgtactaactagcattgtaaaattatttcatgattagaaattacctgtggatatttgtataaaagtgtgaaataaattttttataaaagtgttcattgtttcgtaacacagcattgtatatgtgaagcaaactctaaaattataaatgacaacctgaattatctatttcatcaaaccaaagttcagtgtttttatttttggtgtctcatgtaatctcagatcagccaaagatactagtgccaaagcaatgggattcggggtttttttctgttttcgctctatgtaggtgatcctcaagtctttcattttccttctttatgattaaaagaaacctacaggtatttaacaac

SEQ ID NO: 176 - DNA, 2733 bp, Homo sapiens
  misc_feature: Incyte ID No: g180670
cctctgtctcctgggctgcctgctgagccacgccgccgccgcgccgtcgcccatcatcaagttccccggcgatgtcgcccccaaaacggacaaagagttggcagtgcaatacctgaacaccttctatggctgccccaaggagagctgcaacctgtttgtgctgaaggacacactaaagaagatgcagaagttctttggactgccccagacaggtgatcttgaccagaataccatcgagaccatgcggaagccacgctgcggcaacccagatgtggccaactacaacttcttccctcgcaagcccaagtgggacaagaaccagatcacatacaggatcatcggctacacacctgatctggacccagagacagtggatgatgcctttgctcgtgccttccaagtctggagcgatgtgaccccactgcggttttctcgaatccatgatggagaggcagacatcatgatcaactttggccgctgggagcatggcgatggatacccctttgacggtaaggacggactcctggctcatgccttcgccccaggcactggtgttgggggagactcccattttgatgacgatgagctatggaccttgggagaaggccaagtggtccgtgtgaagtatgggaacgccgatggggagtactgcaagttccccttcttgttcaatggcaaggagtacaacagctgcactgatactggccgcagcgatggcttcctctggtgctccaccacctacaactttgagaaggatggcaagtacggcttctgtccccatgaagccctgttcaccatgggcggcaacgctgaaggacagccctgcaagtttccattccgcttccagggcacatcctatgacagctgcaccactgagggccgcacggatggctaccgctggtgcggcaccactgaggactacgaccgcgacaagaagtatggcttctgccctgagaccgccatgtccactgttggtgggaactcagaaggtgccccctgtgtcttccccttcactttcctgggcaacaaatatgagagctgcaccagcgccggccgcagtgacggaaagatgtggtgtgcgaccacagccaactacgatgacgaccgcaagtggggcttctgccctgaccaagggtacagcctgttcctcgtggcagcccacgagtttggccacgccatggggctggagcactcccaagaccctggggccctgatggcacccatttacacctacaccaagaacttccgtctgtcccaggatgacatcaagggcattcaggagctctatggggcctctcctgacattgaccttggcaccggccccacccccacactgggccctgtcactcctgagatctgcaaacaggacattgtatttgatggcatcgctcagatccgtggtgagatcttcttcttcaaggaccggttcatttggcggactgtgacgccacgtgacaagcccatggggcccctgctggtggccacattctggcctgagctcccggaaaagattgatgcggtatacgaggccccacaggaggagaaggctgtgttctttgcagggaatgaatactggatctactcagccagcaccttggagcgagggtaccccaagccactgaccagcctgggactgccccctgatgtccagcgagtggatgccgcctttaactggagcaaaaacaagaagacatacatctttgctggagacaaattctggagatacaatgaggtgaagaagaaaatggatcctggcttccccaagctcatcgcagatgcctggaatgccatccccgataacctggatgccgtcgtggacctgcagggcggcggtcacagctacttcttcaagggtgcctattacctgaagctggagaaccaaagtctgaagagcgtgaagtttggaagcatcaaatccgactggctaggctgctgagctggccctggctcccacaggcccttcctctccactgccttcgatacaccgggcctggagaactagagaaggacccggaggggcctggcagccgtgccttcagctctacagctaatcagcattctcactcctacctggtaatttaagattccagagagtggctcctcccggtgcccaagaatagatgctgactgtactcctcccaggcgccccttccccctccaatcccaccaaccctcagagccacccctaaagagatactttgatattttcaacgcagccctgctttgggctgccctggtgctgccacacttcaggctcttctcctttcacaaccttctgtggctcacagaacccttggagccaatggagactgtctcaagagggcactggtggcccgacagcctggcacagggcagtgggacagggcatggccaggtggccactccagacccctggcttttcactgctggctgccttagaacctttcttacattagcagtttgctttgtatgcactttgtttttttctttgggtcttgttttttttttccacttagaaattgcatttcctgacagaaggactcaggttgtctgaagtcactgcacagtgcatctcagcccacatagtgatggttcccctgttcactctacttagcatgtccctaccgagtctcttctccactggatggaggaaaaccaagccgtggcttcccgctcagccctccctgcccctcccttcaaccattccccatgggaaatgtcaacaagtatgaataaagacacctactgagtggc

SEQ ID NO: 177 - DNA, 3707 bp, Homo sapiens
  misc_feature: Incyte ID No: 236574.12
gaattcttagttgttttctttagaagaacatttctagggaataatacaagaagatttaggaatcattgaagttataaatctttggaatgagcaaactcagaatggtgctacttgaagactctggatctgctgacttcagaagacattttgtcaacctgagtcccttcaccattactgtggtcttacttctcagtgcctgttttgtcaccagttctcttggaggaacagacaaggagctgaggctagtggatggtgaaaacaagtgtagcggggagagtggaagtgaaagtccaggaggagtggggaacggtgtgtaataatggctggagcatggaagcggtctctgtgatttgtaaccagctgggatgtccaactgctatcaaagcccctggatgggctaattccagtgcaggttctggacgcatttggatggatcatgtttcttgtcgtgggaatgagtcagctctttgggattgcaaacatgatggatggggaaagcatagtaactgtactcaccaacaagatgctggagtgacctgctcagatggatccaatttggaaatgaggctgacgcgtggagggaatatgtgttctggaagaatagagatcaaattccaaggacggtggggaacagtgtgtgatgataacttcaacatagatcatgcatctgtcatttgtagacaacttgaatgtggaagtgctgtcagtttctctggttcatctaattttggagaaggctctggaccaatctggtttgatgatcttatatgcaacggaaatgagtcagctctctggaactgcaaacatcaaggatggggaaagcataactgtgatcatgctgaggatgctggagtgatttgctcaaagggagcagatctgagcctgagactggtagatggagtcactgaatgttcaggaagattagaagtgagattccaaggagaatgggggacaatatgtgatgacggctgggacagttacgatgctgctgtggcatgcaagcaactgggatgtccaactgccgtcacagccattggtcgagttaacgccagtaagggatttggacacatctggcttgacagcgtttcttgccagggacatgaacctgctgtctggcaatgtaaacaccatgaatggggaaagcattattgcaatcacaatgaagatgctggcgtgacatgttctgatggatcagatctggagctaagacttagaggtggaggcagccgctgtgctgggacagttgaggtggagattcagagactgttagggaaggtgtgtgacagaggctggggactgaaagaagctgatgtggtttgcaggcagctgggatgtggatctgcactcaaaacatcttatcaagtgtactccaaaatccaggcaacaaacacatggctgtttctaagtagctgtaacggaaatgaaacttctctttgggactgcaagaactggcaatggggtggacttacctgtgatcactatgaagaagccaaaattacctgctcaggcccacaggggaacccagactggttggaggggacattccctgttctggacgtgttgaagtgaagcatggtgacacgtggggctccatctgtgattcagacttctctctggaagctgccagcgttctatgcagggaattacagtgtggcacagttgtctctatcctggggggagctcactttggagagggaaatggacagatctgggctgaagaattccagtgtgagggacatgagtcccatctttcactctgcccagtagcaccccgcccagaaggaacttgtagccacagcagggatgttggagtagtctgctcaagatacacagaaattcgcttggtgaatggcaagaccccgtgtgagggcagagtggagctcaaaacgcttggtgcctggggatccctctgtaactctcactgggacatagaagatgcccatgttctttgccagcagcttaaatgtggagttgccctttctaccccaggaggagcacgttttggaaaaggaaatggtcagatctggaggcatatgtttcactgcactgggactgagcagcacatgggagattgtcctgtaactgctctaggtgcttcattatgtccttcagagcaagtggcctctgtaatctgctcaggaaaccagtcccaaacactgtcctcgtgcaattcatcgtctttgggcccaacaaggcctaccattccagaagaaagtgctgtggcctgcatagagagtggtcaacttcgcctggtaaatggaggaggtcgctgtgctgggagagtagagatctatcatgagggctcctggggcaccatctgtgatgacagctgggacctgagtgatgcccacgtggtttgcagacagctgggctgtggagaggccattaatgccactggttctgctcattttggggaaggaacagggcccatctggctggatgagatgaaatgcaatggaaaagaatcccgcatttggcagtgccattcacacggctgggggcagcaaaattgcaggcacaaggaggatgcgggagttatctgctcagaattcatgtctctgagactgaccagtgaagccagcagagaggcctgtgcagggcgtctggaagttttttacaatggagcttggggcactgttggcaagagtagcatgtctgaaaccactgtgggtgtggtgtgcaggcagctgggctgtgcagacaaagggaaaatcaaccctgcatctttagacaaggccatgtccattcccatgtgggtggacaatgttcagtgtccaaaaggacctgacacgctgtgggcagtgcccatcatctccatgggagaagagactggccagcccctcggaggagacctggatcacatgtgacaacaagataagacttcaggaaggacccacttcctgttctggacgtgtggagatctggcatggaggttcctgggggacagtgtgtgatgactcttgggacttggacgatgctcaggtggtgtgtcaacaacttggctgtggtccagctttgaaagcattcaaagaagcagagtttggtcaggggactggaccgatatggctcaatgaagtgaagtgcaaagggaatgagtcttccttgtgggattgtcctgccagacgctggggccatagtgagtgtgggcacaaggaagacgctgcagtgaattgcacagatatttcagtgcagaaaaccccacaaaaagccacaacaggtcgctcatcccgtcagtcatcctttattgcagtcgggatccttggggttgttctgttggccattttcgtcgcattattcttcttgactaaaaagcgaagacagagacagcggcttgcagtttcctcaagaggagagaacttagtccaccaaattcaataccgggagatgaattcttgcctgaatgcagatgatctggacctaatgaattcctcaggaggccattctgagccacactgaaaaggaaaatgggaatttataacccagtgagttcagcctttaagataccttgatgaagacctggactattgaatggagcagaaattcacctctctcactgactattacagttgcatttttatggagttcttcttctcctaggattcctaagactgctgctgaatttataaaaattaagtttgtgaatgtgactacttagtggtgtatatgagactttcaagggaattaaataaataaataagaatgttaaa

SEQ ID NO: 178 - DNA, 4809 bp, Homo sapiens
  misc_feature: Incyte ID No: 1000033.6
gttgggaccagatggattgtagggagtagggtacaatacagtctggtctcctccagctccttctttctgcaacatggggaagaacaaactccttcatccaagtctggttcttctcctcttggtcctcctgcccacagacgcctcagtctctggaaaaccgcagtatatggttctggtcccctccctgctccacactgagaccactgagaagggctgtgtccttctgagctacctgaatgagacagtgactgtaagtgcttccttggagtctgtcaggggaaacaggagcctcttcactgacctggaggcggagaatgacgtactccactgtgtcgccttcgctgtcccaaagtcttcatccaatgaggaggtaatgttcctcactgtccaagtgaaaggaccaacccaagaatttaagaagcggaccacagtgatggttaagaacgaggacagtctggtctttgtccagacagacaaatcaatctacaaaccagggcagacagtgaaatttcgtgttgtctccatggatgaaaactttcaccccctgaatgagttgattccactagtatacattcaggatcccaaaggaaatcgcatcgcacaatggcagagtttccagttagagggtggcctcaagcaattttcttttcccctctcatcagagcccttccagggctcctacaaggtggtggtacagaagaaatcaggtggaaggacagagcaccctttcaccgtggaggaatttgttcttcccaagtttgaagtacaagtaacagtgccaaagataatcaccatcttggaagaagagatgaatgtatcagtgtgtggcctatacacatatgggaagcctgtccctggacatgtgactgtgagcatttgcagaaagtatagtgacgcttccgactgccacggtgaagattcacaggctttctgtgagaaattcagtggacagctaaacagccatggctgcttctatcagcaagtaaaaaccaaggtcttccagctgaagaggaaggagtatgaaatgaaacttcacactgaggcccagatccaagaagaaggaacagtggtggaattgactggaaggcagtccagtgaaatcacaagaaccataaccaaactctcatttgtgaaagtggactcacactttcgacagggaattcccttctttgggcaggtgcgcctagtagatgggaaaggcgtccctataccaaataaagtcatattcatcagaggaaatgaagcaaactattactccaatgctaccacggatgagcatggccttgtacagttctctatcaacaccaccaatgttatgggtacctctcttactgttagggtcaattacaaggatcgtagtccctgttacggctaccagtgggtgtcagaagaacacgaagaggcacatcacactgcttatcttgtgttctccccaagcaagagctttgtccaccttgagcccatgtctcatgaactaccctgtggccatactcagacagtccaggcacattatattctgaatggaggcaccctgctggggctgaagaagctctccttctattatctgataatggcaaagggaggcattgtccgaactgggactcatggactgcttgtgaagcaggaagacatgaagggccatttttccatctcaatccctgtgaagtcagacattgctcctgtcgctcggttgctcatctatgctgttttacctaccggggacgtgattggggattctgcaaaatatgatgttgaaaattgtctggccaacaaggtggatttgagcttcagcccatcacaaagtctcccagcctcacacgcccacctgcgagtcacagcggctcctcagtccgtctgcgccctccgtgctgtggaccaaagcgtgctgctcatgaagcctgatgctgagctctcggcgtcctcggtttacaacctgctaccagaaaaggacctcactggcttccctgggcctttgaatgaccaggacgatgaagactgcatcaatcgtcataatgtctatattaatggaatcacatatactccagtatcaagtacaaatgaaaaggatatgtacagcttcctagaggacatgggcttaaaggcattcaccaactcaaagattcgtaaacccaaaatgtgtccacagcttcaacagtatgaaatgcatggacctgaaggtctacgtgtaggtttttatgagtcagatgtaatgggaagaggccatgcacgcctggtgcatgttgaagagcctcacacggagaccgtacgaaagtacttccctgagacatggatctgggatttggtggtggtaaactcagcaggtgtggctgaggtaggagtaacagtccctgacaccatcaccgagtggaaggcaggggccttctgcctgtctgaagatgctggacttggtatctcttccactgcctctctccgagccttccagcccttctttgtggagctcacaatgccttactctgtgattcgtggagaggccttcacactcaaggccacggtcctaaactaccttcccaaatgcatccgggtcagtgtgcagctggaagcctctcccgccttcctagctgtcccagtggagaaggaacaagcgcctcactgcatctgtgcaaacgggcggcaaactgtgtcctgggcagtaaccccaaagtcattaggaaatgtgaatttcactgtgagcgcagaggcactagagtctcaagagctgtgtgggactgaggtgccttcagttcctgaacacggaaggaaagacacagtcatcaagcctctgttggttgaacctgaaggactagagaaggaaacaacattcaactccctactttgtccatcaggtggtgaggtttctgaagaattatccctgaaactgccaccaaatgtggtagaagaatctgcccgagcttctgtctcagttttgggagacatattaggctctgccatgcaaaacacacaaaatcttctccagatgccctatggctgtggagagcagaatatggtcctctttgctcctaacatctatgtactggattatctaaatgaaacacagcagcttactccagaggtcaagtccaaggccattggctatctcaacactggttaccagagacagttgaactacaaacactatgatggctcctacagcacctttggggagcgatatggcaggaaccagggcaacacctggctcacagcctttgttctgaagacttttgcccaagctcgagcctacatcttcatcgatgaagcacacattacccaagccctcatatggctctcccagaggcagaaggacaatggctgtttcaggagctctgggtcactgctcaacaatgccataaagggaggagtagaagatgaagtgaccctctccgcctatatcaccatcgcccttctggagattcctctcacagtcactcaccctgttgtccgcaatgccctgttttgcctggagtcagcctggaagacagcacaagaaggggaccatggcagccatgtatataccaaagcactgctggcctatgcttttgccctggcaggtaaccaggacaagaggaaggaagtactcaagtcacttaatgaggaagctgtgaagaaagacaactctgtccattgggagcgccctcagaaacccaaggcaccagtggggcatttttacgaaccccaggctccctctgctgaggtggagatgacatcctatgtgctcctcgcttatctcacggcccagccagccccaacctcggaggacctgacctctgcaaccaacatcgtgaagtggatcacgaagcagcagaatgcccagggcggtttctcctccacccaggacacagtggtggctctccatgctctgtccaaatatggagcagccacatttaccaggactgggaaggctgcacaggtgactatccagtcttcagggacattttccagcaaattccaagtggacaacaacaaccgcctgttactgcagcaggtctcattgccagagctgcctggggaatacagcatgaaagtgacaggagaaggatgtgtctacctccagacatccttgaaatacaatattctcccagaaaaggaagagttcccctttgctttaggagtgcagactctgcctcaaacttgtgatgaacccaaagcccacaccagcttccaaatctccctaagtgtcagttacacagggagccgctctgcctccaacatggcgatcgttgatgtgaagatggtctctggcttcattcccctgaagccaacagtgaaaatgcttgaaagatctaaccatgtgagccggacagaagtcagcagcaaccatgtcttgatttaccttgataaggtgtcaaatcagacactgagcttgttcttcacggttctgcaagatgtcccagtaagagatctgaaaccagccatagtgaaagtctatgattactacgagacggatgagtttgcaattgctgagtacaatgctccttgcagcaaagatcttggaaatgcttgaagaccacaaggctgaaaagtgctttgctggagtcctgttctcagagctccacagaagacacgtgtttttgtatctttaaagacttgatgaataaacactggtgattaaggaagtccaggagttttacaaggacacctacaacaagctgaaaaccaaggatgagccccagcgggaaacgctgaaagccatccactatgcgttgaactgctgtggtttggctgggggcgtggaacggtttatctcagacatctgtcccaagaaggacgtactcgaaaacttcaccgtgaagtcctgtgctgatgccatcaaag

SEQ ID NO: 179 - DNA, 1164 bp, Homo sapiens
  misc_feature: Incyte ID No: 037567.22
  unsure 880: a, t, c, g, or other
gcggaatgtcacaaaggcgcagggtggttgcccaaagagtttggttttgtggggctgcagaccaaagcggcccaggaagcgccggacgtcgctgaagctggcgtggcgaggcacgttctgcagctccagtttaaagatctcagaggacactcatgaggaccatgatacttccactgagaatacagacgagtccaaccatgaccctcagtttgagccaatagtttctcttcctgagcaagaaattaaaacactggaagaagatgaagaggaactttttaaaatgcgggcaaaactgttccgatttgcctctgagaacgatctcccagaatggaaggagcgaggcactggtgacgtcaagctcctgaagcacaaggagaaaggggccatccgcctcctcatgcggagggacaagaccctgaagatctgtgccaaccactacatcacgccgatgatggagctgaagcccaacgcaggtagcgaccgtgcctgggtctggaacacccacgctgacttcgccgacgagtgccccaagccagagctgctggccatccgcttcctgaatgctgagaatgcacagaaattcaaaacaaagtttgaagaatgcaggaaagagatcgaagagagagaaaagaaagcaggatcaggcaaaaatgatcatgccgaaaaagtggcggaaaagctagaagctctctcggtgaaggaggagaccaaggaggatgctgaggagaagcaataaatcgtcttattttattttcttttcctctctttcctttcctttttttaaaaaattttaccctgcccctctttttcggtttgtttttattctttcatttttacaagggacgttatataaagaactgaactcaacattcaggttgtnttttttttttgtttctaagtttttgccctattgaagatgacttcagaaaatccattccccagtcatgaaaatgtactgtgctaactttcttttccatagtggaaacacttatttatagtcatcaaaaatagtgaataaaaaacacatttggaacctgggccagatggcaggactgtgtgtgtacaggcccctgcgctgtgagcgccgctcgcctaagcctcccgggtgtatgtccaggcctgtccgcagcacaggtgggtgctgcacctcacggtagcctgggt

SEQ ID NO: 180 - DNA, 2996 bp, Homo sapiens
  misc_feature: Incyte ID No: 995610.1
ggagtttattcataacgcgctctccaagtatacgtggcaatgcgttgctgggttattttaatcattctaggcatcgttttcctccttatgcctctatcattcctccctatctacactaacatcccacgctctgaacgcgcgcccattaatacccttctttcctccactctccctgggactcttgatcaaagcgcggccctttccccagccttagcgaggcgccctgcagcctggtacgcgcgtggcgtggcggtgggcgcgcagtgcgttctcggtgtggagggcagctgttccgcctgcgatgatttatactcacaggacaaggatgcggtttgtcaaacagtactgctacggaggagcagcagagaaagggagagggtttgagagggagcaaaagaaaatggtaggcgcgcgtagttaattcatgcggctctcttactctgtttacatcctagagctagagtgctcggctgcccggctgagtctcctccccaccttccccaccctccccaccctccccataagcgccctcccgggttcccaaagcagagggcgtgggggaaaagaaaaaagatcctctctcgctaatctccgcccaccggccctttataatgcgagggtctggacggctgaggacccccgagctgtgctgctcgcggccgccaccgccgggccccggccgtccctggctcccctcctgcctcgagaagggcagggcttctcagaggcttggcgggaaaaagaacggagggagggatcgcgctgagtataaaagccggttttcggggctttatctaactcgctgtagtaattccagcgagaggcagagggagcgagcgggcggccggctagggtggaagagccgggcgagcagagctgcgctgcgggcgtcctgggaagggagatccggagcgaatagggggcttcgcctctggcccagccctcccgctgatcccccagccagcggtccgcaacccttgccgcatccacgaaactttgcccatagcagcgggcgggcactttgcactggaacttacaacacccgagcaaggacgcgactctcccgacgcggggaggctattctgcccatttggggacacttccccgccgctgccaggacccgcttctctgaaaggctctccttgcagctgcttagacgctggatttttttcgggtagtggaaaaccagcagcctcccgcgacgatgcccctcaacgttagcttcaccaacaggaactatgacctcgactacgactcggtgcagccgtatttctactgcgacgaggaggagaacttctaccagcagcagcagcagagcgaggctgcagcccccggcgcccagcgaggatatctggaagaaattcgagctgctgcccaccccgcccctgtcccctagccgccgctccgggctctgctcgccctcctacgttgcggtcacacccttctcccttcggggagacaacgacggcggtggcgggagcttctccacggccgaccagctggagatggtgaccgagctgctgggaggagacatggtgaaccagagtttcatctgcgacccggacgacgagaccttcatcaaaaacatcatcatccaggactgtatgtggagcggcttctcggccgccgccaagctcgtctcagagaagctggcctcctaccaggctgcgcgcaaagacagcggcagcccgaaccccgcccgcggccacagcgtctgctccacctccagcttgtacctgcaggatctgagcgccgccgcctcagagtgcatcgacccctcggtggtcttcccctaccctctcaacgacagcagctcgcccaagtcctgcgcctcgcaagactccagcgccttctctccgtcctcggattctctgctctcctcgacggagtcctccccgcagggcagccccgagcccctggtgctccatgaggagacaccgcccaccaccagcagcgactctgaggaggaacaagaagatgaggaagaaatcgatgttgtttctgtggaaaagaggcaggctcctggcaaaaggtcagagtctggatcaccttctgctggaggccacagcaaacctcctcacagcccactggtcctcaagaggtgccacgtctccacacatcagcacaactacgcagcgcctccctccactcggaaggactatcctgctgccaagagggtcaagttggacagtgtcagagtcctgagacagatcagcaacaaccgaaaatgcaccagccccaggtcctcggacaccgaggagaatgtcaagaggcgaacacacaacgtcttggagcgccagaggaggaacgagctaaaacggagcttttttgccctgcgtgaccagatcccggagttggaaaacaatgaaaaggcccccaaggtagttatccttaaaaaagccacagcatacatcctgtccgtccaagcagaggagcaaaagctcatttctgaagaggacttgttgcggaaacgacgagaacagttgaaacacaaacttgaacagctacggaactcttgtgcgtaaggaaaagtaaggaaaacgattccttctaacagaaatgtcctgagcaatcacctatgaacttgtttcaaatgcatgatcaaatgcaacctcacaaccttggctgagtcttgagactgaaagatttagccataatgtaaactgcctcaaattggactttgggcataaaagaacttttttatgcttaccatcttttttttttctttaacagatttgtatttaagaattgtttttaaaaaattttaagatttacacaatgtttctctgtaaatattgccattaaatgtaaataactttaataaaacgtttatagcagttacacagaatttcaatcctagtatatagtacctagtattataggtactataaaccctaattttttttatttaagtacattttgctttttaaagttgatttttttctattgtttttagaaaaaataaaataactggcaaatatatcattgagccaaaa

SEQ ID NO: 181 - DNA, 3303 bp, Homo sapiens
  misc_feature: Incyte ID No: 1702374
  unsure 3216: a, t, c, g, or other
aagctggtggggttggggaggaacgagagcccggcagccgactgtgccgagggacccggggacacctccttcgcccggccggcacccggtcagcacgtccccccttccctcccgcagggagcggacatggactacgactcgtaccagcactatttctacgactatgactgcggggaggatttctaccgctccacggcgcccagcgaggacatctggaagaaattcgagctggtgccatcgccccccacgtcgccgccctggggcttgggtcccggcgcaggggacccggcccccgggattggtcccccggagccgtggcccggagggtgcaccggagacgaagcggaatcccggggccactcgaaaggctggggcaggaactacgcctccatcatacgccgtgactgcatgtggagcggcttctcggcccgggaacggctggagagagctgtgagcgaccggctcgctcctggcgcgccccgggggaacccgcccaaggcgtccgccgccccggactgcactcccagcctcgaagccggcaacccggcgcccgccgccccctgtccgctgggcgaacccaagacccaggcctgctccgggtccgagagcccaagcgactcggagaatgaagaaattgatgttgtgacagtagagaagaggcagtctctgggtattcggaagccggtcaccatcacggtgcgagcagaccccctggatccctgcatgaagcatttccacatctccatccatcagcaacagcacaactatgctgcccgttttcctccagaaagctgctcccaagaagaggcttcagagaggggtccccaagaagaggttctggagagagatgctgcaggggaaaaggaagatgaggaggatgaagagattgtgagtcccccacctgtagaaagtgaggctgcccagtcctgccaccccaaacctgtcagttctgatactgaggatgtgaccaagaggaagaatcacaacttcctggagcgcaagaggcggaatgacctgcgttcgcgattcttggcgctgagggaccaggtgcccaccctggccagctgctccaaggcccccaaagtagtgatcctaagcaaggccttggaatacttgcaagccctggtgggggctgagaagaggatggctacagagaaaagacagctccgatgccggcagcagcagttgcagaaaagaattgcatacctcagtggctactaactgaccaaaaagcctgacagttctgtcttacgaagacacaagtttattttttaacctccctctcccctttagtaatttgcacattttggttatggtgggacagtctggacagtagatcccagaatgcattgcagccggtgcacacacaataaaggcttgcattcttggaaaccttgaaacccagctctccctcttccctgactcatgggagtgctgtatgttctctggcgcctttggcttcccagcaggcagctgactgaggagccttggggtctgcctagctcactagctctgaagaaaaggctgacagatgctatgcaacaggtggtggatgttgtcaggggctccagcctgcatgaaatctcacactctgtatgagtttaagctaggaaaggatgctcccaactggtgtctctggggtgatgcaaggacagctgggcctggatgctctcccagaggctcctttttccagaagacacacgagctgtcttgggtgaagacaagcttgcagacttgatcaacattgaccattacctcactgtcagacactttacagtagccaaggagttggaaacctttatatattatgatgttagctgacccccttcctcccactcccaatgctgcgaccctgggaacacttaaaaagcttggcctctagattctttgtctacagagccctctgggctctctcctctgagggagggacctttctttcctcacaagggacttttttgttccattatgccttgttatgcaatgggctctacagcaccctttcccacaggtcagaaatatttccccaagacacagggaaatcggtcctagcctggggcctggggatagcttggagtcctggcccatgaacttgatccctgcccaggtgttttccgaggggcacttgaggcccagtcttttctcaaggcaggtgtaagacacctcagagggagaactgtactgctgcctctttcccacctgcctcatctcaatccttgagcggcaagtttgaagttcttctggaaccatgcaaatctgtcctcctcatgcaattccaaggagcttgctggctctgcagccacccttgggccccttccagcctgccatcgcaatcagatatctttcccagaatctgggcgtttctgaagttttggggagagctgttgggactcatccatccagtgctccagaaggtgaacttgcttctggtgggttttaaaggaacctccaggagatatgcttagccaaccatgatggattttaccccagctggactcggcagctccaagtggaatccacgtgcagcttctagtctgggaaagtcacccaacctagcagttgtcatgtgggtaacctcaggcacctctaagcctgtcctggaagaaggaccagcagcccctccagaactctgcctaggacagcaggtgcctgctggctctgggtttggaagttgggggtgggtagggggtggtaagtaagtactatatatggctctggaaaaccagctgctacttccaaatctattgtccataatggtttctttctgaggttgcttcttggcctcagaggaccctaggggatgtttggaaatagcctctctacccttctggagcatggtttacaaaagccagctgacttctggaattgtctatggaggacagtttgggtgtaggttactgatgtctcaactgaatagcttgtgttttataagctgctgttggctattatgctgggggagtcttttttttttatattgtatttttgtatgccttttgcaaagtggtgttaactgtttttgtacaaggaaaaaaaactcttggggcaatttcctgttgcaagggtctgatttattttgaaaggcaagttcacctgaaattttgtatttagttgtgattactgattgcctgattttaaaatgttgccttctgggacatcttctaataaaagatttctcaaacatgtcagagtgggggcagcttatgccacctgagtcctccntcaaccacggaaaaactaatttcaaggtaagcccacaagtgatcacagagggctgcacttctctaaccatgttgctaacctggtcac

SEQ ID NO: 182 - DNA, 450 bp, Homo sapiens
  misc_feature: Incyte ID No: 427883.47
ggcaggaatgtctgaggtggcaacacttctcttcagccagacagcactggccagtttggagtctgtccatcctgcaggccacaagctctggatgaggaacttgaggcaagtcaccagcccctgatcatttcgcctaaaagagcaaggactagagttcctgacctccaggccagtccctgatccctgacctaatgttatcgcggaatgatggcccagggctcctcagagcaggaactccactatgcatctctgcagaggctgccagtgcccagcagtgagggacctgacctcaggggcagagacaagagaggcaccaaggaggatccaagagctgactatgcctgcatttgctgagaacaaacccacctgagcaccccagacaccttcctcaacccaggcgggtggacagggtccccctgtggtccagccagtaaaaaccatggtcccccc

SEQ ID NO: 183 - DNA, 1643 bp, Homo sapiens
  misc_feature: Incyte ID No: 093687.6
gcccagctgcgcgcgccttgggattgactgtccacgctcgcccggctcgtccgacgcgccctccgccagccgacagacacagccgcacgcactgccgtgttctccctgcggctcggacacatagtatgaccattaggtgtttcgtctcccacccattttctatggaaaaccaaggggatcgggccatgatagccactggcagctttgaagaacgggacacctttagagaagcttgatcttggaggcctcaccgtgagaccttacaaagccggattccggcagagttcctctatctcgtcttgttgctgattaaaggtgccccctgtctccagtttttctccatctcctgggacgtagcaggaaatcagcatcatggttgggttcaaggccacagatgtgccccctactgccactgtgaagtttcttggggctggcacagctgcctgcatcgcagatctcatcacctttcctctggatactgctaaagtccggttacagatccaaggagaaagtcaggggccagtgcgcgctacagccagcgcccagtaccgcggtgtgatgggcaccattctgaccatggtgcgtactgagggcccccgaagcctctacaatgggctggttgccggcctgcagcgccaaatgagctttgcctctgtccgcatcggcctgtatgattctgtcaaacagttctacaccaagggctctgagcatgccagcattgggagccgcctcctagcaggcagcaccacaggtgccctggctgtggctgtggcccagcccacggatgtggtaaaggtccgattccaagctcaggcccgggctggaggtggtcggagataccaaagcaccgtcaatgcctacaagaccattgcccgagaggaagggttccggggcctctggaaagggacctctcccaatgttgctcgtaatgccattgtcaactgtgctgagctggtgacctatgacctcatcaaggatgccctcctgaaagccaacctcatgacagatgacctcccttgccacttcacttctgcctttggggcaggcttctgcaccactgtcatcgcctcccctgtagacgtggtcaagacgagatacatgaactctgccctgggccagtacagtagcgctggccactgtgcccttaccatgctccagaaggaggggccccgagccttctacaaagggttcatgccctcctttctccgcttgggttcctggaacgtggtgatgttcgtcacctatgagcagctgaaacgagccctcatggctgcctgcacttcccgagaggctcccttctgagcctctcctgctgctgacctgatcacctctggctttgtctctagccgggccatgctttccttttcttccttctttctcttccctccttcccttctctccttccctctttccccacctcttccttccgctcctttacctaccaccttccctctttctacattctcatctactcattgtctcagtgctggtggagttgacatttgacagtgtgggaggcctcgtaccagccaggatcccaagcgtcccgtcccttggaaagttcagccagaatcttcgtcctgcccccgacagcccagcctagcccacttgtcatccataaagcaagctcaaccttgaaaaat

SEQ ID NO: 184 - DNA, 2517 bp, Homo sapiens
  misc_feature: Incyte ID No: 414100.4
aattcggcacgagatttctatggctcccatttgtaatacaaggaaatgtcagcttctagttttgtaacgtcttgcccaagagctgcgaccgttaacttgtggagtttggacggcgtcaatgtcaattggttgcccgacctttattctgccttgtcccatagatttagaaagaggctgacacatctggtaactagtttacggtcatctgcctctaagcgacatttagggtaagcgacatttttcagaaaccaaggccctccctctcgtctcactagtgggaagggtggaaagaacaggacagaaagctcttcctcttgtgtgaggcagttgctgtggaagccccataggcaggaggcccccggggcagcacatcctgtctgcttgtgtctgctgcagagttctgtccttgcattggtgccgcctcaggccaggctgcactgctgggacctgggccatgtctccccaccccaccgccctcctgggcctagtgctctgcctggcccagaccatccacacgcaggaggaagatctgcccagaccctccatctcggctgagccaggcaccgtgatccccctggggagccatgtgactttcgtgtgccggggcccggttggggttcaaacattccgcctggagagggagagtagatccacatacaatgatactgaagatgtgtctcaagctagtccatctgagtcagaggccagattccgcattgactcagtaagtgaaggaaatgccgggccttatcgctgcatctattataagccccctaaatggtctgagcagagtgactacctggagctgctggtgaaagaaacctctggaggcccggactccccggacacagagcccggctcctcagctggacccacgcagaggccgtcggacaacagtcacaatgagcatgcacctgcttcccaaggcctgaaagctgagcatctgtatattctcatcggggtctcagtggtcttcctcttctgtctcctcctcctggtcctcttctgcctccatcgccagaatcagataaagcaggggccccccagaagcaaggacgaggagcagaagccacagcagaggcctgacctggctgttgatgttctagagaggacagcagacaaggccacagtcaatggacttcctgagaaggacagagagacagacacctcggccctggctgcagggagttcccaggaggtgacgtatgctcagctggaccactgggccctcacacagaggacagcccgggctgtgtccccacagtccacaaagcccatggccgagtccatcacgtatgcagccgttgccagacactgaccccatacccacctggcctctgcacctgagggtagaaagtcactctaggaaaagcctgaagcagccatttggaaggcttcctgttggattcctcttcatctagaaagccagccaggcagctgtcctggagacaagagctggagactggaggtttctaaccagcatccagaaggttcgttagccaggtggtcccttctacaatcgagcagctccttggacagactgtttctcagttatttccagagacccagctacagttccctggctgtttctagagacccagctttattcacctgactgtttccagagacccagctaaagtcacctgcctgttctaaaggcccagctacagccaatcagccgatttcctgagcagtgatgccacctccaagcttgtcctaggtgtctgctgtgaacctccagtgaccccagagactttgctgtaattatctgccctgctgaccctaaagaccttcctagaagtcaagagctagccttgagactgtgctatacacacacagctgagagccaagcccagttctctgggttgtgctttactccacgcatcaataaataattttgaaggcctcacatctggcagccccaggcctggtcctgggtgcataggtctctcggacccactctctgccttcacagttgttcaaagctgagtgagggaaacaggacttacgaaaacgtgtcagcgttttctttttaaaatttaattgatcaggattgtacgtattcaaggtgtaaaatgtgataatttgtcgtacacgtacattgtgcaatgacagtcacaatcaattcctcagcgcacccatcgccacggatacgatacattagatattctgaacttgctcatcttaggacttcacattggtgtcagtgttttctgacaaatcacgtgtatcaggaatgaatgagggaggtgtggctgggtgaaggcagagagccgaccctacaggtccacatctgcacatacatgcacaggaatgcatgctctcacacacatgcctacacacacgccacacacagacatgcacatacactcacacgccccaggaaatccaaggaatcactgagcctgctgttggttgaggcatttctgagtatccaccctacctgtagggtcagatgtactgattgacacagaaaattaccctatgtaccactaggaggcggcagaatctcatttg

SEQ ID NO: 185 - DNA, 897 bp, Homo sapiens
  misc_feature: Incyte ID No: 235148.4
atgaaagagtgcaagctctcacttccccttcctgtacagggcaggttgtgcagctggaggcagagcagtcctctctggggagcctgaagcaaacatggatcaagaaactgtaggcaatgttgtcctgttggccatcgtcaccctcatcagcgtggtccagaatggattctttgcccataaagtggagcacgaaagcaggacccagaatgggaggagcttccagaggaccggaacacttgcctttgagcgggtctacactgccaaccagaactgtgtagatgcgtaccccactttcctcgctgtgctctggtctgcggggctactttgcagccaagttcctgctgcgtttgctggactgatgtacttgtttgtgaggcaaaagtactttgtcggttacctaggagagagaacgcagagcacccctggctacatatttgggaaacgcatcatactcttcctgttcctcatgtccgttgctggcatattcaactattacctcatcttctttttcggaagtgactttgaaaactacataaagacgatctccaccaccatctcccctctacttctcattccctaactctctgctgaatatggggttggtgttctcatctaatcaatacctacaagtcatcataattcagctcttgagagcattctgctcttctttagatggctgtaaatctattggccatctgggcttcacagcttgagttaaccttgcttttccgggaacaaaatgatgtcatgtcagctccgccccttgaacatgaccgtggccccaaatttgctattcccatgcattttgtttgtttcttcacttatcctgttctctgaagatgttttgtgaccaggtttgtgttttcttaaaataaaatgcagagacatgttttaaaa

SEQ ID NO: 186 - DNA, 1560 bp, Homo sapiens
  misc_feature: Incyte ID No: 430039.3
  unsure 334: a, t, c, g, or other
agacacagaaccctagatgccctgcagaatccttcctgttacggtccccctccctgaaacatccttcattgcaatatttccaggaaaggaagggggctggctcggaggaagagaggtggggaggtgatcagggttcacagaggagggaactgaatgacatcccaggattacataaactgtcagaggcagccgaagagttcacaagtgtgaagcctggaagccggcgggtgccgctgtgtaggaaagaagctaaagcacttccagagcctgtccggagctcagaggttcggaagacttatcgaccatggagcgcgcgtcctgcttgttgctgctnctgctgccgctggtgcacgtctctgcgaccacgccagaaccttgtgagctggacgatgaagatttccgctgcgtctgcaacttctccgaacctcagcccgactggtccgaagccttccagtgtgtgtctgcagtagaggtggagatccatgccggcggtctcaacctagagccgtttctaaagcgcgtcgatgcggacgccgacccgcggcagtatgctgacacggtcaaggctctccgcgtgcggcggctcacagtgggagccgcacaggttcctgctcagctactggtaggcgccctgcgtgtgctagcgtactcccgcctcaaggaactgacgctcgaggacctaaagataaccggcaccatgcctccgctgcctctggaagccacaggacttgcactttccagcttgcgcctacgcaacgtgtcgtgggcgacagggcgttcttggctcgccgagctgcagcagtggctcaagccaggcctcaaggtactgagcattgcccaagcacactcgcctgccttttcctgcgaacaggttcgcgccttcccggcccttaccagcctagacctgtctgacaatcctggactgggcgaacgcggactgatggcggctctctgtccccacaagttcccggccatccagaatctagcgctgcgcaacacaggaatggagacgcccacaggcgtgtgcgccgcactggcggcggcaggtgtgcagccccacagcctagacctcagccacaactcgctgcgcgccaccgtaaaccctagcgctccgagatgcatgtggtccagcgccctgaactccctcaatctgtcgttcgctgggctggaacaggtgcctaaaggactgccagccaagctcagagtgctcgatctcagctgcaacagactgaacagggcgccgcagcctgacgagctgcccgaggtggataacctgacactggacgggaatcccttcctggtccctggaactgccctcccccacgagggctcaatgaactccggcgtggtcccagcctgtgcacgttcgaccctgtcggtgggggtgtcgggaaccctggtgctgctccaaggggcccggggctttgcctaagatccaagacagaataatgaatggactcaaactgccttggcttcaggggagtcccgtcaggacgttgaggacttttcgaccaattcaaccctttgccccacctttattaaaatcttaaacaacgaaaa

SEQ ID NO: 187 - DNA, 285 bp, Homo sapiens
  misc_feature: Incyte ID No: 2158373F6
  unsure 249, 255, 257, 281: a, t, c, g, or other
tggtgtgccctggtgccgtggtggcggtcactccctctgctgccagtgtttggacagaacccaaattctttatttttggtaagatattgtgctttacctgtattaacagaaatgtgtgtgtgtggtttgtttttttgtaaaggtgaagtttgtatgtttacctaatattacctgttttgtatacctgagagcctgctatgttctttttttgttgatccaaaattaaaaaaaaaaataccaccaacaaanaaaaanancaggaacatatgagttgagcagantaat

SEQ ID NO: 188 - DNA, 1202 bp, Homo sapiens
  misc_feature: Incyte ID No: 1098815.7
  unsure 1170: a, t, c, g, or other
ggtggatatggtggcagtggggatggctataatggatttggtaatgatggaagcaattttggaggtggtggaagctacaatgattttgggaattacaacaatcagtcttcaaattttggaccccatgaagggaggaaattttggaggcagaagctctggcccctatggcggtggaggccaatactttgcaaaaccacgaaaccaaggtggctatggcggttccagcagcagcagtagctatggcagtggcagaagattttaattaggaaacaaagcttagcaggagaggagagccagagaagtgacagggaagctacaggttacaacagatttgtgaactcagccaagcacagtggtggcagggcctagctgctacaaagaagacatgttttagacaaatactcatgtgtatgggcaaaaaactcgaggactgtatttgtgactaattgtataacaggttattttagtttctgttctgtggaaagtgtaaagcattccaacaaagggttttaatgtagatttttttttttgcaccccatgctgttgattgctaaatgtaacagtctgatcgtgacgctgaataaatgtcttttttttaatgtgctgtgtaaagttagtctactcttaagccatcttggtaaatttccccaacagtgtgaagttagaattccttcagggtgatgccaggttctatttggaatttatatacaacctgcttgggtggagaagccattgtcttcggaaaccttggtgtagttgaactgatagttactgttgtgacctgaagttcaccattaaaagggattacccaagcaaaatcatggaatggttataaaagtgattgttggcacatcctatgcaatatatctaaattgaataatggtaccagataaaattatagatgggaatgaagcttgtgtatccattatcatgtgtaatcaataaacgatttaattctcttgaatgaaatgacaactgtatggatttgggactggcagagatttggactttccctacccactccccctgataataatgttgaatgcttctatcacaattcaagttcaaagctctgccagggaatagaaactagctgctggctaatgccgctccataaatccgcagatttgaagtgtctgggaggccttttaaaaataactaatatcaganagcattttaatgaacgtaaagataggcttaca

SEQ ID NO: 189 - DNA, 1417 bp, Homo sapiens
  misc_feature: Incyte ID No: 474491.18
gctcagcgtgcacccttctttgtgctcgggttaggaggagctagggctgccatcgggccggtgcagatacggggttgctcttttgctcataagaggggcttcgctggcagtctgaacggcaacgcggtaaaaatattgcttcggtgggtgacgcggtacagctgcccaagggcgttcgtaacgggaatgccgaagcgtgggaaaaagggagcggtggcggaagacggggatgagctcaggacagagccagaggccaagaagagtaagacggccgcaaagaaaaatgacaaagaggcagcaggagagggcccagccctgtatgaggaccccccagatcagaaaacctcacccagtggcaaacctgccacactgcaagatctgctcttggaatgtggatgggcttcgagcctggattaagaagaaaggattagattgggtaaaggaagaagccccagatatactgtgccttcaagagaccaaatgttcagagaacaaactaccagctgaacttcaggagctgcctggactctctcatcaatactggtcagctccttcggacaaggaagggtacagtggcgtgggcctgctttcccgccagtgcccactcaaagtttcttacggcataggcgatgaggagcatgatcaggaaggccgggtgattgtggctgaatttgactcgtttgtgctggtaacagcatatgtacctaatgcaggccgaggtctggtacgactggagtaccggcagcgctgggatgaagcctttcgcaagttcctgaagggcctggcttcccgaaagccccttgtgctgtgtggagacctcaatgtggcacatgaagaaattgaccttcgcaaccccaaggggaacaaaaagaatgctggcttcacgccacaagagcgccaaggcttcggggaattactgcaggctgtgccactggctgacagctttaggcacctctaccccaacacaccctatgcctacaccttttggacttatatgatgaatgctcgatccaagaatgttggttggcccttgattactttttgttgtcccatctctgttacctgcattgtgtgacagcaagatccgttccaaggccctcggcagtgatcactgtcctatcaccctatacctagcactgtgacaccacccctaaatcactttgagcctgggaaataagccccctcaactaccattccttctttaaacactcttcagagaaatctgcattctatttctcatgtataaaactaggaatcctccaaccaggctcctgtgatagagttcttttaagcccaagattttttatttgagggttttttgttttttaaaaaaaaaattgaacaaagactactaatgactttgtttgaattatccacatgaaaataaagagccatagtttcaaaaaaaaaaaaaagg

SEQ ID NO: 190 - DNA, 1487 bp, Homo sapiens
  misc_feature: Incyte ID No: 474491.19
  unsure 1408: a, t, c, g, or other
acccacgtgggggctcagcgtgcacccttctttgtgctcgggttaggaggagctaggctgccatcgggccggtgcagatacggggttgctcttttgctcataagaggggcttcgctgggcagtctgaacggcaagcttgagtcaggacccttaattaagatcctcaattggctggagggcagatctcgcgagtagggcaacgcggtaaaaatattgcttcggtgggtgacgcggtacagctgcccaagggcgttcgtaacgggaatgccgaagcgtgggaaaaagggagcggtggcggaagacggggatgagctcaggacagagccagaggccaagaagagtaagacggccgcaaagaaaaatgacaaagaggcagcaggagagggcccagccctgtatgaggaccccccagatcagaaaacctcacccagtggcaaacctgccacactcaagatctgctcttggaatgtggatgggcttcgagcctggattaagaagaaaggattagattgggtaaaggaagaagccccagatatactgtgccttcaagagaccaaatgttcagagaacaaactaccagctgaacttcaggagctgcctggactctctcatcaatactggtcagctccttcggacaaggaagggtacagtggcgtgggcctgctttcccgccagtgcccactcaaagtttcttacggcataggcgatgaggagcatgatcaggaaggccgggtgattgtggctgaatttgactcgtttgtgctggtaacagcatatgtacctaatgcaggccgaggtctggtacgactggagtaccggcagcgctgggatgaagcctttcgcaagttcctgaagggcctggcttcccgaaagccccttgtgctgtgtggagacctcaatgtggcacatgaagaaattgaccttcgcaaccccaaggggaacaaaaagaatgctggcttcacgccacaagagcgccaaggcttcggggaattactgcaggctgtgccactggctgacagctttaggcacctctaccccaacacaccctatgcctacaccttttggacttatatgatgaatgctcgatccaagaatgttggttggcgccttgattactttttgttgtcccactctctgttacctgcattgtgtgacagcaagatccgttccaaggccctcggcagtgatcactgtcctatcaccctatacctagcactgtgacaccacccctaaatcactttgagcctgggaaataagccccctcaactaccattccttctttaaacactcttcagagaaatctgcattctatttctcatgtataaaactaggaatcctccaaccaggctcctgtgatagagttcttttaagcccaagattttttatttgagggttttttgttttttanaaaaaaattgaacaaagactactaatgactttgtttgaattatccacatgaaaataaagagccatagtttcaaaaaaaa

SEQ ID NO: 191 - DNA, 2609 bp, Homo sapiens
  misc_feature: Incyte ID No: 419031.5
  unsure 2549: a, t, c, g, or other
cacatggtggaagggcatacaagctctctgaagtccctctctccctcctcctcaggttctctatcgacgagtctggtagctgagcgttgggctgtaggtcgctgtgctgtgtgatcccccagagccatgcccgagatagtggatacctgttcgttggcctctccggcttccgtctgccggaccaagcacctgcacctgcgctgcagcgtcgactttactcgccggacgctgaccgggactgctgctctcacggtccagtctcaggaggacaatctgcgcagcctggttttggatacaaaggaccttacaatagaaaaagtagtgatcaatggacaagaagtcaaatatgctcttggagaaagacaaagttacaagggatcgccaatggaaatctctcttcctatcgctttgagcaaaaatcaagaaattgttatagaaatttcttttgagacctctccaaaatcttctgctctccagtggctcactcctgaacagacttctgggaaggaacacccatatctctttagtcagtgccaggccatccactgcagagcaatccttccttgtcaggacactccttctgtgaaattaacctatactgcagaggtgtctgtccctaaagaactggtggcacttatgagtgctattcgtgatggagaaacacctgacccagaagacccaagcaggaaaatatacaaattcatccaaaaagttccaataccctgctacctgattgctttagttgttggagctttagaaagcaggcaaattggcccaagaactttggtgtggtctgagaaagagcaggtggaaaagtctgcttatgagttttctgagactgaatctatgcttaaaatagcagaagatctgggaggaccgtatgtatggggacagtatgacctattggtcctgccaccatccttcccttatggtggcatggagaatccttgccttacttttgtaactcctactctactggcaggcgacaagtcactctccaatgtcattgcacatgaaatatctcatagctggacagggaatctagtgacccaacaaaacttgggatcacttttggttaaatgagggacatactgtgtacttggaacgccacatttgcggacgattgtttggtgaaaagttcagacattttaatgctctgggaggatggggagaactacagaattcggtaaagacatttggggagacacatcctttcaccaaacttgtggttgatctgacagatatagaccctgatgtagcttattcttcagttccctatgagaagggctttgctttacttttttaccttgaacaactgcttggaggaccagagattttcctaggattcttaaaagcttatgttgagaagttttcctataagagcataactactgatgactggaaggatttcctgtattcctattttaaagataaggttgatgttctcaatcaagttgattggaatgcctggctctactctcctggactgcctcccataaagcccaattatgatatgactctgacaaatgcttgtattgccttaagtcaaagatggattactgccaaagaagatgatttaaattcattcaatgccacagacctgaaggatctctcttctcatcaattgaatgagtttttagcacagacgctccagagggcacctcttccattggggcacataaagcgaatgcaagaggtgtacaacttcaatgccattaacaattctgaaatacgattcagatggctgcggctctgcattcaatccaagtgggaggacgcaattcctttggcgctaaagatggcaactgaacaaggaagaatgaagtttacccggcccttattcaaggatcttgctgcctttgacaaatcccatgatcaagctgtccgaacctaccaagagcacaaagcaagcatgcatcccgtgactgcaatgctggtggggaaagacttaaaagtggattaaagacctgcgtattgatgattttagagatttctcttttttaaatggaattcgtaaagaaatataaaacttcagctcacaattaaaactgtctttttagttttggctttttattgttttgttggtgattttactgaaataaagttgagctacttcttcttaaaataggaagtcggaggaagaaggactaaccagctccctggagtatagaggaatatgctttccctgtcatgccaccaggggctatatgtgccacctttcaggttggggccaaggaagtgatttcaatgtgacacccgggagattttgacctccagacgtcagccgcccgttccattgtggcacatgtttcaatctgagtgttgtttgccttagctgtggtcggaatagcttcattgggtggtaccgttgttatcaggtgtaccgaagcagtttttgtctaggttttaaggctttgctcttcgtttgtcattagaggatttctacgcagatcatccaggagtccggttttctttgccagttcgagaaccgataatcatttaacgagtttctatggtaaggttaggggccctgatgtatattatctcantatccagtgcctaggtttaaataccggttctgcgattataaatgggaaaagggctttttt

SEQ ID NO: 192 - DNA, 5079 bp, Homo sapiens
  misc_feature: Incyte ID No: 399658.1
  unsure 130-151, 4930, 4977, 5068, 5076: a, t, c, g, or other
ctggagcagcctctggcagcagcggggagaatgggagtgcggggcgccagaccgccgcggggtgtcacggccgccacgaagcctgcgaggcgcggggccggcgcccgcggcttttaaacccgggaaggcnnnnnnnnnnnnnnnnnnnnnngcagatcgcggcgcgcaccaggcgccggggcggcggccgaatggagagaaagggctcggcggccggggccaaggggaacccgagccctgcccgcggccggagaggggcagcggccaccgccgccgctgtgcgtcccgggcggcggcggaggagccccagcgaggggccaggtcggggcggcggccgagccggccgagctcatccgacgagcgcacgagttcaaaagccaaggggcgcagtgctacaaggacaagaaattccgtgaagccataggcaaataccaccgggcgttgctggagctgaaggggctgctgccgccccccggggaacgggagcgggactcgcgcgcggcctccccggctggggccctgaagcccggccgcctctcggaggagcagagcaagacggtggaagccatcgagatcgactgttacaacagcctggcagcctgcctgctccaggctgagctggtaaactatgaacgagtcaaggaatattgcctcaaagtcttgaagaaggaaggggagaacttcaaggccctttaccggtctggtgtggccttctaccaccttggggactatgacaaagcactctactacctgaaagaagcaaggacccaacaaccaacagacaccaacgtgattcggtatatccagctgacggagatgaaactcagccgatgctcccagagagaaaaagaagccatgtaaccaggaagcagctccagagctgcgcccacgcctgaccggggacttccaggcatcccctggcagagagccccgtcctggattctgtccctttctccccacttcttctggctcctcatttttcctcctgttgcaccccagctctttgtctcctcccagtacgaaaaggagagatgcaaatttggaatctggtaggtcgcccagacaatggagacatcctctcctctagcaggtcagcgactgagaggggcctgacttctgctgggacagctggagaggagtctcatgggctgggatgctgttgtggctttgactttggccagtgcttctgacagaggcggagcctggcaagtgtaccatcccacaggcagcaggcacacagcccatgggctggatccttccacactttcctgacagaccagaaccagagcatctcgaggcaactgttagaaatccagggacgagacaaacagagaagcgctggtgaagccaacatagagactgtcaatgtgtacactggagttcccacccccaccccccacccgtcacttagcccctgcctccttcccccactcgttgtcttggcttgtgctttctcctctccccatcggggatccgagactctgccaggattcacatgccactgaagcccactcagtgccctctggtgaccacacataccattcccccggactcccacccagcaggcagctgtgaccgcagaagggcaggatgaagtgggccaaggtttgggacaggttgactgtgtaggtgacagggagggaaagatgatggccaggggaaagagcatcgtataggctaggggattgaactgtggactgattcagtgtaaataaaaacaaattaacaggtagtagttcctgtcagttctgttggaagcagcccactccctcacttttactccttcctccaaccctcaatcagagctacttacagccaggcaggatggggctttccccaaagcaattggccgtttgtccagtggcagacaatggtggctacagcctttgtgcttttaagagtgggctgggattgtggagactgcccaggggcttggctttgtcagaacttgtacaatcttcttttgatgaaattatctgaactcaacatctagcacatagaatgtgttcaacaaatgcttgttgaatgaataaattatgactgcagactggctctcctgccttaaactaatttcatcccagcctagtctcctgatgtctgtgctcgttatgctatgccatgttgcttcagtcaaacaagaaacacttactgagggcatattgtttgcccatcattgtgcaatatgctgtgggacatgggatgtcgtctcagtcttcaaggaaatggaagggttaagaaatgcatatgagattattaccaatgacacctttaatttatatgatgctttaaaattatcagagcactttcatgtatttttcgtgtgactagtgaaaaagacaatgttgtacaaaattaaaatatatacagatgcaataatgtgaatagttaggatttattaaatgcattatcttcagatctttacatctgtataatctcatttctttcatgcagttactctgggatactgttcccatttgatgggtaagaatattgaaaaccagaaaaattaattatcccaaggttgcatggcctttagtggcatagctaggatttgaaccaggcctgcctgactccagagctctggctagtatctatgctatacttagttgcctctctgtaagtataatattgggcaattataaccatttgagaacaggacaatatgtattaacctgaaaagtgttcatgatgtcagtgatagtacatggcctccttatgtatttactcaagggccccaaaagaccagaggccagaatccctagtagtcagagcagtgacaggtcagaaaaaggcagctgaggtccaatagttatgtctgtgtattgctcattctacttactgatggagccagcatgtatctcaacaactcacctagcattcatcacccatccccagcattgggaaagggtcacaattaagaccgaaaggaaacacaaagttaaatatgggttaattatgtaagcagatgccccaccacggcaggatccaatcacagccgaggggcccagaagagagcagcgtaagttatattcacatagttccccaaaggctttcaacgggggctacaggaaggtgctagaaatattgaggggcctgccattactcacctagagctcactctctggagaagaggaaaaggaagaagctatttccgctgccacattctccccaatccctactatattatgctgtctttcctcttcctcctagctggctttacatgaccctaacccaaaactaccctatggccccacacgggaatgtgttcaaacgccccgacccccacccccacccccattcccaagcctccaacttagaacgtttgtgatttggcagatggtttgttaggatctgaaggatgaagagaagggtagaggtcacctggagaatgagttcaaactgccagggtcttcccttggtctttgtgcgtcaggaaggactccgagtaattattccctatgcagagacaggagagaggtcttgtttacatgagtgtgctggggcagggctggacaatccaggatatgattgtagccatcccatgtagaaagatcaaaaaccagaacgaaatgaagacagcctctcagaacctcatagaacaagcgtccaggtcatctgcttgtttggtgacttagatatacaggcttactggaactccattcactgtgacctgaagttaaataatcccaaagagaaaaagctacctggggtattggttgatgtttggggtgatagggctgaattttctgtgcatttgtccaacaaaggctttagagcacaaaaccaggttcattctccctaccaaatcttcagcttccttctcctcatccctccccaaaacaagaactgtgatttaattccgtacgttgcggatgtcactgctgacctatgtagctggagtactaatcaggcatctgacctgcactgtcatcccctgcctggacttttgcgatggactctttgggggaaaaactaacgctttttaattattgtgaaagcatcatgtgtgtattgtagaagttttaggaaaaaaaggacaaaatccaatccataagcttaccacccaagacaaacgtgtattcttttgaatataccttttagttctttttggtgtaaatgtacacacgcacacacagttgtggatttttttaaacaaaaactggatacactgaatatactctttaataacttttcaagtgtgtatttatattttagaatatgtaatcctacacagatacaaaattcaaaaagtacaaactgctctgtagtcagaagtaaatcttctccctaccccgtctgccagcatctagtttccctctaatttattttgcatcctagtggagatgcttacacattgtcaaacatatgtatatattcttttatcacacacaaatggcagcatattggacactttttgttttttgctccttctgttccttcacttaataatatcacgaacattttcggcatatcaaactttctcaacagcatcttcattgtatggatggaccctttttttatcatcaatcctcaaatagtgattatttcatttgttcccaatcttcattgtaaatagtgttgcaactgacattcttgtagctaaattttgcacatgtctataacgatttccttaggataaactccaagaagagacttgcttggctatttttaagaattttgatacatgttgccaaccaccctccagaaagtttgtaccaaaacgctctcctatttggatcctagagagtaccctgtttcctgcaccctaacactaggtatcatcacttatcaaatctttcccaatttggtagctgggataatagtatgtcaatgttattttaactttctttgattcttcgcgaataacattttccatatgtcttattgaccatttgtacttctttctttgtgaattttctatttatttganattggtatgtttattatcaatttgtaattttattaagaatattattnttgtcaagaaatgctgcaaatatgctttccaagtgctttgctttcaaattttgtttatggtgctttttgacatacataaattcgtaattcngcaattanaaa

SEQ ID NO: 193 - DNA, 4698 bp, Homo sapiens
  misc_feature: Incyte ID No: 474913.3
  unsure 4633: a, t, c, g, or other
ggggcccggacgcatgaggggggtcggcgcgcgtgtctacgcggacgcaccggctaagctgcttctgccgccgccggccgcctgggaccttgcggtgaggctgcgcggggccgaggccgcctccgagcgccaggtttattcagtcaccatgaagctgctgctgctgcacccggccttccagagctgcctcctgctgaccctgcttggcttatggagaaccacccctgaggctcacgcttcatccctgggtgcaccagctatcagcgctgcctccttcctgcaggatctaatacatcggtatggcgagggtgacagcctcactctgcagcagctgaaggccctactcaaccacctggatgtgggagtgggccggggtaatgtcacccagcacgtgcaaggacacaggaacctctccacgtgctttagttctggagacctcttcactgcccacaatttcagcgagcagtcgcggattgggagcagcgagctccaggagttctgccccaccatcctccagcagctggattcccgggcctgcacctcggagaaccaggaaaacgaggagaatgagcagacggaggaggggcggccaagcgctgttgaagtgtggggatacggtctcctctgtgtgaccgtcatctccctctgctccctcctgggggccagcgtggtgcccttcatgaagaagaccttttacaagaggctgctgctctacttcatagctctggcgattggaaccctctactccaacgccctcttccagctcatcccggaggcatttggtttcaaccctctggaagattattatgtctccaagtctgcagtggtgtttgggggcttttatcttttctttttcacagagaagatcttgaagattcttcttaagcagaaaaatgagcatcatcatggacacagccattatgcctctgagtcgcttccctccaagaaggaccaggaggagggggtgatggagaagctgcagaacggggacctggaccacatgattcctcagcactgcagcagtgagctggacggcaaggcgcccatggtggacgagaaggtcattgtgggctcgctctctgtgcaggacctgcaggcttcccagagtgcttgctactggctgaaaggtgtccgctactctgatatcggcactctggcctggatgatcactctgagcgacggcctccataatttcatcgatggcctggccatcggtgcttccttcactgtgtcagttttccaaggcatcagcacctcggtggccatcctctgtgaggagttcccacatgagctaggagactttgtcatcctgctcaacgctgggatgagcatccaacaagctctcttcttcaacttcctttctgcctgctgctgctacctgggtctggcctttggcatcctggccggcagccacttctctgccaactggatttttgcgctagctggaggaatgttcttgtatatttctctggctgatatgttccctgagatgaatgaggtctgtcaagaggatgaaaggaagggcagcatcttgattccatttatcatccagaacctgggcctcctgactggattcaccatcatggtggtcctcaccatgtattcaggacagatccagattgggtagggctctgccaagagcctgtgggactggaagtcgggccctgggctgcccgatcgccagcccgaggacttaccatccacaatgcaccacggaagaggccgttctatgaaaaactgacacagactgtattcctgcattcaaatgtcagccgtttgtaaaatgctgtatcctaggaataagctgccctggtaaccagtctctagctagtgcctcttgccctctcctcacctccttttctctcagtgactctggaacctgaatgcagcttacaagacaagcctgacttttttctctgattaccttggcctcctcttggaaccagtgctgaaaggttttgaatcctttacccaacaatgcaaaaatagagccaatggttataacttggctagaaatatcaagagttgaatccatagtgtggggcccatgactctagctgggcaccttggacctccagctggccaatagaagagacaggagacaggaagccttcccattttttcaaagtctgtttaattgcctattacttctctcaaagagaacctgaagtcagaacacatgagcagggtgagaggtgaggcaaggttcatcctgaatgggagaggaagtcgaaccactgctgtgtgtcttgtcaggatgctcacttgttcctactgagatgctggatattgattttgtaacagcacctggtgtttcacggctgtccgagtgagctaacgtggcggtgtggctgcctggacctcctctttcaggttaacgctgacagaatggaggctcaggctgtctgcaagaaaacagttggtttggctgtgattttgacctcctcttccccactgccatcttctaagagactttgtagctgcctcctagaagcacattctgagcacatttgagacctctgtgttagaggggagactgcacaaactatcctcccccaggttgagacgtctgcagagtggcaagctgacttgtagaaatggggtgccatttatgctctacttagacaagggtaatcagaaatggaatcagtgcaggcaaaatttaggatttgccgcttccataaatcaaagcatgactaatagggggtctctgaaatgtaagggcacaaacttcacttagggcatcgcagatgtttgcagaatggttggcctaatgattatgctacagatgggttttaaatgacccgtctaggttactgcttccttgcaaaaaaagtcgaatcctgcattgaattgaatatgaatttctctaactctctccagaaaatggatggagataacttgtctttaaaactgtaggccagccttagccactgtggagcccttgcctccgagctctggcttcaaggggagctcttctccaggttcactaggtgaattgatttattattatcatattgataatgtgagattctttagccactttggggagcctgtctctccagaagcctttcttagtggtgcccacagttggagcccaggggccatgtttgcaaactgattcatgtgcatggctgacaggagtactggttcactaccaatgcctgagcttttctcttacatagaaaaactgtccgctctcagtaatcacaagcagcatccgttttgttttctcttcttgggagacatctgtcaaaccaggaatattcttgaaaagaacgtgagcaggaaaaactgctggtgatactttttttaagttttgtttttatcttgcctgttggcttcaatacatttgagaatacgctgaagagggaaaatttcagtgatggagattctagattaaatatcaggactgatttcctggtgggaggattatggtccagttttaccaaagaaccaattccttgaatgttggaatctaactttttatattgtcattattattgttgtttttaaacggttctttgtcttttctgttttatttttctcaagctgctttcaggagctagcagaaaataactcaaagttgaagactctggaagattttgctttaacctaactcgcattgatgtattaaatttataattttagcattcccaatagatcctatcattccttaaacataataccctttgtcttggagtagaatactaagttagagttagtggatttctagtttaggagaggagctcaaaactataatctttaacaaattgaaaaatgaaatagggtgttttccctttttgtgcacacctatattaccttaagaaatttccttccatagacagctgcctcaaagggaaatcctctttaaaccgtagttggcgcagaggtcagtcctagtcggagcttaggaggggcggagacgctcacatcgtctgacttgagtcgccactgattgtggcaacagctttgcctcatgagtcaaaaattggcaatttcttttgatttttagttgttgaatttgctgtttcaagcatttgtacatattagaagtctaaggagtagcaagtcagtgggaggactttttcacccctggcattagcagcttcgacctcattttccagatgcaccagctcctattaataagttagcaaggaaagtgtatgtcacgtgcaggaacagtgaggcagggacaggggttctgctccttctcacttcaccaccggcacacagcttgcccctgtctttgcccccaaaggtattttgtgtctagtgtcaaattggagctattcttcactggtccttaaccttgggttttaaaaagaaggcttctctgtttgggtagcgtaagagctgagtatagtaagtcctcttccaaagagatggcaatatgctgggcatctactttaaaacaaagttgtctgatttttgcaagagaggttaggattttattgttcttatttccctttacagttctgcagttccatcacagtatttttttaaataactcaggtgtatgagaagaaattagaaaagaaaattaacttatgtggactgtaaatgttttatttgtaagattctataaataaagctatattctgtaaaaatgaaacgaaataaaatcagcatntaatggtatgaatttccctttaatcactgagtcccacacatttttatatcaattcaaaatatttt

SEQ ID NO: 194 - DNA, 1301 bp, Homo sapiens
  misc_feature: Incyte ID No: 199898.3
  unsure 19: a, t, c, g, or other
ctggctctgaccgcgctgncctgggcccgagagcccaggaggcgtgtctcagagaaaagatataagcggcccccggacgctaaagcggtgccagcggcggagtctccaactgggagagctgcagctggcccgagaggaggagaacgctgaggtcggtcggaccaacggacgcgctgaccgctgccaactggcagctgcgcgctgccttcctgctcgcgccgtgccactaaggtcactcccgcctccgagagcccagagccgagatggaaacggtccaggagctgatccccctggccaaggagatgatggcccagaagcgcaaggggaagatggtgaagctgtacgtgctgggcagccgtgctggccctcttcggcgtggtgctcggcctgatggagactgtgtgcagccccttcacggccgccagacgtctgcgggaccaggaggcagccgtggcggagctgcaggccgccctggagcgacaggctctccagaagcaagccctgcaggagaaaggcaagcagcaggacacggtcctcggcggccgggccctgtccaaccggcagcacgcctcctaggaactgtgggagaccagcggagtgggagggagacgcagtagacagagacagaccgagaaggaagggagagacagagggggcgcgcgcacaggagcctgactccgctgggagagtgcaggagcacgtgctgttttttatttggacttaacttcagagaaaccgctgacatctagaactgacctaccacaagcatccaccaaaggagtttgggattgagttttgctgctgtgcagcactgcattgtcatgacatttccaacactgtgtgaattatctaaatgcgtctaccattttgcactagggaggaaggataaatgctttttatgttattattattaattattacaatgaccaccattttgcattttgaaataaaaaactttttataccatatctcatgtaattcctgagaggtgtggtgtcctggggtgggaagcagggagggtgagcaggtgggcgatggtgatgggttcttacctgagcactgcagagggagcagcttcctgagggtcagacacttgcttcacacctaggaacagtatcagagggacacaattgaagtgtttccttcagagccagtgtttctctttggggtttgtgtgagttcaccagagtcggaagttgccaactttccttgtgcttgacttcaaactccttgaaagcagacaccacatattagtgaggctttgtattcccagcgcctgtaatcccatctactcaggaggc

SEQ ID NO: 195 - DNA, 2496 bp, Homo sapiens
  misc_feature: Incyte ID No: 253550.14
gcgagcactgcggctgggcgctgaggatcagccgcttcctgcctggattccacagcttcgcgccgtgtactgtcgccccatccctgcgcgcccagcctgccaaggcagcgtgccccggttgcaggcgtcatgcagcgggcgcgacccacgctctgggccgctgcgctgactctgctggtgctgctccgcgggccgccggtggcgcgggctggcgcgagctcggggggcttgggtcccgtggtgcgctgcgagccgtgcgacgcgcgtgcactggcccagtgcgcgcctccgcccgccgtgtgcgcggagctggtgcgcgagccgggctgcggctgctgcctgacgtgcgcactgagcgagggccagccgtgcggcatctacaccgagcgctgtggctccggccttcgctgccagccgtcgcccgacgaggcgcgaccgctgcaggcgctgctggacggccgcgggctctgcgtcaacgctagtgccgtcagccgcctgcgcgcctacctgctgccagcgccgccagctccaggaaatgctagtgagtcggaggaagaccgcagcgccggcagtgtggagagcccgtccgtctccagcacgcaccgggtgtctgatcccaagttccaccccctccattcaaagataatcatcatcaagaaagggcatgctaaagacagccagcgctacaaagttgactacgagtctcagagcacagatacccagaacttctcctccgagtccaagcgggagacagaatatggtccctgccgtagagaaatggaagacacactgaatcacctgaagttcctcaatgtgctgagtcccaggggtgtacacattcccaactgtgacaagaagggattttataagaaaaagcagtgtcgcccttccaaaggcaggaagcggggcttctgctggtgtgtggataagtatgggcagcctctcccaggctacaccaccaaggggaaggaggacgtgcactgctacagcatgcagagcaagtagacgcctgccgcaaggttaatgtggagctcaaatatgccttattttgcacaaaagactgccaaggacatgaccagcagctggctacagcctcgatttatatttctgtttgtggtgaactgattttttttaaaccaaagtttagaaagaggtttttgaaatgcctatggtttctttgaatggtaaacttgagcatcttttcactttccagtagtcagcaaagagcagtttgaattttcttgtcgcttcctatcaaaatattcagagactcgagcacagcacccagacttcatgcgcccgtggaatgctcaccacatgttggtcgaagcggccgaccactgactttgtgacttaggcggctgtgttgcctatgtagagaacacgcttcacccccactccccgtacagtgcgcacaggctttatcgagaataggaaaacctttaaaccccggtcatccggacatcccaacgcatgctcctggagctcacagccttctgtggtgtcatttctgaaacaagggcgtggatccctcaaccaagaagaatgtttatgtcttcaagtgacctgtactgcttggggactattggagaaaataaggtggagtcctacttgtttaaaaaatatgtatctaagaatgttctagggcactctgggaacctataaaggcaggtatttcgggccctcctcttcaggaatcttcctgaagacatggcccagtcgaaggcccaggatggcttttgctgcggccccgtggggtaggagggacagagagacagggagagtcagcctccacattcagaggcatcacaagtaatggcacaattcttcggatgactgcagaaaatagtgttttgtagttcaacaactcaagacgaagcttatttctgaggataagctctttaaaggcaaagctttattttcatctctcatcttttgtcctccttagcacaatgtaaaaaagaatagtaatatcagaacaggaaggaggaatggcttgctggggagcccatccaggacactgggagcacatagagattcacccatgtttgttgaacttagagtcattctcatgcttttctttataattcacacatatatgcagagaagatatgttcttgttaacattgtatacaacatagccccaaatatagtaagatctatactagataatcctagatgaaatgttagagatgctatttgatacaactgtggccatgactgaggaaaggagctcacgcccagagactgggctgctctcccggaggccaaacccaagaaggtctggcaaagtcaggctcagggagactctgccctgctgcagacctcggtgtggacacacgctgcatagagctctccttgaaaacagaggggtctcaagacattctgcctacctattagcttttctttatttttttaactttttggggggaaaagtatttttgagaagtttgtcttgcaatgtatttataaatagtaaataaagtttttaccatt

SEQ ID NO: 196 - DNA, 4324 bp, Homo sapiens
  misc_feature: Incyte ID No: 331597.2
  unsure 4073, 4082: a, t, c, g, or other
attggaagaagaagcatagtatagaagaaaggcaaacacaacacattcaacctctgccaccatggggaactgggctgtgaatgaggggctctccatttttgtcattctggtttggctggggttgaacgtcttcctctttgtctggtattaccgggtttatgatattccacctaagttcttttacacaagaaaacttcttgggtcagcactggcactggccagggcccctgcagcctgcctgaatttcaactgcatgctgattctcttgccagtctgtcgaaatctgctgtccttcctcaggggttccagtgcgtgctgctcaacaagagttcgaagacaactggacaggaatctcacctttcataaaatggtggcatggatgattgcacttcactctgcgattcacaccattgcacatctatttaatgtggaatggtgtgtgaatgcccgagtcaataattctgatccttattcagtagcactctctgaacttggagacaggcaaaatgaaagttatctcaattttgctcgaaagagaataaagaaccctgaaggaggcctgtacctggctgtgaccctgttggcaggcatcactggagttgtcatcacgctgtgcctcatattaattatcacttcctccaccaaaaccatccggaggtcttactttgaagtcttttggtacacacatcatctctttgtgatcttcttcattggccttgccatccatggagctgaacgaattgtacgtgggcagaccgcagagagtttggctgtgcataatataacagtttgtgaacaaaaaatctcagaatggggaaaaataaaggaatgcccaatccctcagtttgctggaaaccctcctatgacttggaaatggatagtgggtcccatgtttctgtatctctgtgagaggttggtgcggttttggcgatctcaacagaaggtggtcatcaccaaggtggtcactcaccctttcaaaaccatcgagctacagatgaagaagaaggggttcaaaatggaagtgggacaatacatttttgtcaagtgcccaaaggtgtccaagctggagtggcacccttttacactgacatccgcccctgaggaagacttctttagtatccatatccgcatcgttggggactggacagaggggctgttcaatgcttgtggctgtgataagcaggagtttcaagatgcgtggaaactacctaagatagcggttgatgggccctttggcactgccagtgaagatgtgttcagctatgaggtggtgatgttagtgggagcagggattggggtcacacccttcgcatccattctcaagtcagtctggtacaaatattgcaataacgccaccaatctgaagctcaaaaagatctacttctactggctgtgccgggacacacatgcctttgagtggtttgcagatctgctgcaactgctggagagccagatgcaggaaaggaacaatgccggcttcctcagctacaacatctacctcactggctgggatgagtctcaggccaatcactttgctgtgcaccatgatgaggagaaagatgtgatcacaggcctgaaacaaaagactttgtatggacggcccaactgggataatgaattcaagacaattgcaagtcaacaccctaataccagaataggagttttcctctgtggacctgaagccttggctgaaaccctgagtaaacaaagcatctccaactctgagtctggccctcggggagtgcatttcattttcaacaaggaaaacttctaacttgtctcttccatgaggaaataaatgtgggttgtgctgccaaatgctcaaataatgctaattgataatataaataccccctgcttaaaaatggacaaaaagaaactataatgtaatggttttcccttaaaggaatgtcaaagattgtttgatagtgataagttacatttatgtggagctctatggttttgagagcacttttacaaacattatttcatttttttcctctcagtaatgtcagtggaagttagggaaaagattcttggactcaattttagaatcaaaagggaaaggatcaaaaggttcagtaacttccctaagattatgaaactgtgaccagatctagcccatcttactccaggtttgatactctttccacaatactgagctgcctcagaatcctcaaaatcagtttttatattccccaaaagaagaaggaaaccaaggagtagctatatatttctactttgtgtcatttttgccatcattattatcatactgaaggaaattttccagatcattaggacataatacatgttgagagtgtctcaacacttagtagtgacagtattgacatctgagcatactccagtttactaatacagcagggtaactgggccagatgttctttctacagaagaatattggattgattggagttaatgtaatactcatcatttaccactgtgcttggcagagagcggatactcaagtaagttttgttaaatgaatgaatgaatttagaaccacacaatgccaagatagaattaatttaaagccttaaacaaaatttatctaaagaaataacttctattactgtcatagaccaaaggaatctgattctccctagggtcaagaacaggctaaggatactaaccaataggattgcctgaagggttctgcacattcttatttgaagcatgaaaaaagagggttggaggtggagaattaacctcctgccatgactctggctcatctagtcctgctccttgtgctataaaataaatgcagactaatttcctgcccaaagtggtcttctccagctagcccttatgaatattgaacttaggaattgtgacaaatatgtatctgatatggtcatttgttttaaataacacccaccccttattttccgtaaatacacacacaaaatggatcgcatctgtgtgactaatggtttatttgtattatatcatcatcatcatcctaaaattaacaacccagaaacaaaaatctctatacagagatcaaattcacactcaatagtatgttctgaatatatgttcaagagagagtctctaaatcactgttagtgtggccaagagcagggttttctttttgttcttagaactgctcccatttctgggaactaaaaccagttttatttgccccaccccttggagccacaaatgtttagaactcttcaacttcggtaatgaggaagaaggagaaagagctgggggaagggcagaagactggtttaggaggaaaaggaaataaggagaaaagagaatgggagagtgagagaaaataaaaaaggcaaaagggagagagaggggaagggggtctcatattggtcattccctgccccagatttcttaaagtttgatatgtatagaatataattgaaggaggtatacacatattgatgttgttttgattatctatggtattgaatcttttaaaatctggtcacaaattttgatgctgagggggattattcaagggactaggatgaactaaataagaactcagttgttctttgtcatactactattcctttcgtctcccagaatcctcagggcactgagggtaggtctgacaaataaggcctgctgtgcgaatatagcctttctgaaatgtaccaggatggtttctgcttagagacacttaggtccagcctgttcacactgcacctcaggtatcaattcatctattcaacagatatttattgtgttattactatgagtcaggctctgtttattgtttcaattctttacaccaaagtatgaactggagagggtacctcagttataaggagtctgagaatattggccctttctaacctatgtgcataattaaaaccagcttcatttgttgctccgagagtgtttctccaaggttttctatcttcaaaaccaactaagttatgaaagtagagagatctgccctgtgttatccagttatgagataaaaaatgaatataagagtgcttgtcattataaaagtttccttttttattctctcaagccaccagctgccagccaccagcagccagctgccagcctagctttttttnttttttttnttttttttagcacttagtatttagcatttattaacaggtactctaagaatgatgaagcattgtttttaatcttaagactatgaaggtttttcttagttcttctgcttttgcaattgtgtttgtgaaatttgaatacttgcaggctttgtatgtgaataattctagcgggggacctgggagataattcctacggggaattcttaaaactgtgctcaactattaaaatgaatgagctttctttg

SEQ ID NO: 197 - DNA, 815 bp, Homo sapiens
  misc_feature: Incyte ID No: 997377.1
gtttctgcatggccaagagccagaccctccctctgggctctgctggcccaacccaccaagggatgctttatttaaacagttccaagtaggggagaccagctgcccctgaaccccagaacaaccagctggatcagttctcacaggagctacagcgcggagactgggaaacatggttccaaaactgttcacttcccaaatttgtctgcttcttctgttggggcttctggctgtggagggctcactccatgtcaaacctccacagtttacctgggctcaatggtttgaaacccagcacatcaatatgacctcccagcaatgcaccaatgcaatgcgggcaattaacaattatcgatggcgttgcaaaaaccaaaatacttttcttcgtacaacttttgctaatgtagttaatgtttgtggtaaccaaagtatacgctgccctcataacagaactctcaacaattgtcatcggagtagattccgggtgcctttactccactgtgacctcataaatccaggtgcacagaatatttcaaactgcacgtatgcagacagaccaggaaggaggttctatgtagttgcatgtgacaacagagatccacgggattctccacggtatcctgtggttccagttcacctggataccaccatctaagctcctgtatcagcactcctcatcatcactcatctggccaagctccttcaatcattagccaaagatcccaatccctccatgtaactctggggtatcagcaactgtcctcatcagtctccataccccttcagctttcctgagctgaagtcccttgtgaaccctg

SEQ ID NO: 198 - DNA, 902 bp, Homo sapiens
  misc_feature: Incyte ID No: 042869.3
  unsure 887: a, t, c, g, or other
ggcagcctttcaggaaagatgcagccactcctgcttctgctgggcctttctcctacccactggggctgaggcaggggagatcatccggaggccgggagagcaggccccactcccgcccctacatggcgtatcttcagatccagagtccagcaggtcagagcagatgtggagggttcctggtgcgagaagactttgtgctgacagcagctcattgctggggaagcaatataaatgtcaccctgggcgcccacaatatccagagacgggaaaacacccagcaacacatcactgcgcgcagagccatccgccaccctcaatataatcagcggaccatccagaatgacatcatgttattgcagctgagcagaagagtcagacggaatcgaaacgtgaacccagtggctctgcctagagcccaggagggactgagacccgggacgctgtgcactgtggccggctggggcagggtcagcatgaggaggggaacagatacactccgagaggtgcagctgagagtgcagagggataggcagtgcctccgcatcttcggttcctacgacccccgaaggcagatttgtgtgggggaccggcgggaacggaaggctgccttcaagggggattccggaggccccctgctgtgtaacaatgtggcccacggcatcgtctcctatggaaagtcgtcaggggttcctccagaagtcttcaccagggtctcaagtttcctgccctggataaggacaacaatgagaagcttcaaactgctggatcagatggagacccccctgtgactgactcttcttctcggggacacaggccagctccacagtgttgccagagccttaataaacgtccacagagtataaataaccaattcctcatttgttcantaaacgtcattcagt

SEQ ID NO: 199 - DNA, 1755 bp, Homo sapiens
  misc_feature: Incyte ID No: 248306.1
  unsure 1751-1752: a, t, c, g, or other
cacactgacgaggccatgattgaatttaggtgacctatagacgcgctgtaactacgctcggaattcggctcgaggtcacctcctccccttgtcgcctaggtccacccgagccccctcccccgggccgcccacgagcacgaagttggcgggagcctataaaagctggtgccggcgcgacccgcggacacacagtgcaggcgcccaagccgccgccgccagatcggtgccgattcctgccctgccccgaccgccagcgcgaccatgtcccatcactgggggtacggcaaacacaacggacctgagcactggcataaggacttccccattgccaagggagagcgccagtcccctgttgacatcgacactcatacagccaagtatgacccttccctgaagcccctgtctgtttcctatgatcaagcaacttccctgaggatcctcaacaatggtcatgctttcaacgtggagtttgatgactctcaggacaaagcagtgctcaagggaggacccctggatggcacttacagattgattcagtttcactttcactggggttcacttgatggacaaggttcagagcatactgtggataaaaagaaatatgctgcagaacttcacttggttcactggaacaccaaatatggggattttgggaaagctgtgcagcaacctgatggactggccgttctaggtatttttttgaaggttggcagcgctaaaccgggccttcagaaagttgttgatgtgctggattccattaaaacaaagggcaagagtgctgacttcactaacttcgatcctcgtggcctccttcctgaatccctggattactggacctacccaggctcactgaccacccctcctcttctggaatgtgtgacctggattgtgctcaaggaacccatcagcgtcagcagcgagcaggtgttgaaattccgtaaacttaacttcaatggggagggtgaacccgaagaactgatggtggacaactggcgcccagctcagccactgaagaacaggcaaatcaaagcttccttcaaataagatggtcccatagtctgtatccaaataatgaatcttcgggtgtttccctttagctaagcacagatctaccttggtgatttggaccctggttgctttgtgtctagttttctagacccttcatctcttacttgatagacttactaataaaatgtgaagactagaccaattgtcatgcttgacacaactgctgtggctggttggtgctttgtttatggtagtagtttttctgtaacacagaatataggataagaaataagaataaagtaccttgactttgttcacagcatgtagggtgatgagcactcacaattgttgactaaaatgctgcttttaaaacataggaaagtagaatggttgagtgcaaatccatagcacaagataaattgagctagttaaggcaaatcaggtaaaatagtcatgattctatgtaatgtaaaccagaaaaaataaatgttcatgatttcaagatgttatattaaagaaaaactttaaaaattattatatatttatagcaaagttatcttaaatatgaattctgttgtaatttaatgacttttgaattacagagatataaatgaagtattatctgtaaaaattgttataattagagttgtgatacagagtatatttccattcagacaatatatcataacttaataaatattgtattttagatatattctctaataaaattcagaattctaaanngga

SEQ ID NO: 200 - DNA, 3298 bp, Homo sapiens
  misc_feature: Incyte ID No: 247220.15
  unsure 17, 1531, 1740-1765: a, t, c, g, or other
cctgcctccgtcccgcngcgccacttcgcctgcctccgtcccgccgcgccacttcgcctgcctccgtcccccgcccgccgcgccatgcctgtggccggctcggagctgccgcgccggcccttgccccccgccgcacaggagcgggacgccgagccgcgtccgccgcacggggagctgcagtacctggggcagatccaacacatcctccgctgcggcgtcaggaaggacgaccgcacgggcaccggcaccctgtcggtattcggcatgcaggcgcgctacagcctgagagatgaattccctctgctgacaaccaaacgtgtgttctggaagggtgttttggaggagttgctgtggtttatcaagggatccacaaatgctaaagagctgtcttccaagggagtgaaaatctgggatgccaatggatcccgagactttttggacagcctgggattctccaccagagaagaaggggacttgggcccagtttatggcttccagtggaggcattttggggcagaatacagagatatggaatcagattattcaggacagggagttgaccaactgcaaagagtgattgacaccatcaaaaccaaccctgacgacagaagaatcatcatgtgcgcttggaatccaagagatcttcctctgatggcgctgcctccatgccatgccctctgccagttctatgtggtgaacagtgagctgtcctgccagctgtaccagagatcgggagacatgggcctcggtgtgcctttcaacatcgccagctacgccctgctcacgtacatgattgcgcacatcacgggcctgaagccaggtgactttatacacactttgggagatgcacatatttacctgaatcacatcgagccactgaaaattcagcttcagcgagaacccagacctttcccaaagctcaggattcttcgaaaagttgagaaaattgatgacttcaaagctgaagactttcagattgaagggtacaatccgcatccaactattaaaatggaaatggctgtttagggtgctttcaaaggagctcgaaggatattgtcagtctttaggggttgggctggatgccgaggtaaaagttctttttgctctaaaagaaaaaggaactaggtcaaaaatctgtccgtgacctatcagttattaatttttaaggatgttgccactggcaaatgtaactgtgccagttctttccataataaaaggctttgagttaactcactgagggtatctgacaatgctgaggttatgaacaaagtgaggagaatgaaatgtatgtgctcttagcaaaaacatgtatgtgcatttcaatcccacgtacttataaagaaggttggtgaatttcacaagctatttttggaatatttttagaatattttaagaatttcacaagctattccctcaaatctgagggagctgagtaacaccatcgatcatgatgtagagtgtggttatgaactttaaagttatagttgttttatatgttgctataataaagaagtgttctgcattcgtccangctttgttcattctgtactgccacttatctgctcagttccttcctaaaatagattaaagaactctccttaagtaaacatgtgctgtattctggtttggatgctacttaaaagagtatattttagaaataatagtgaatatattttgccctatttttctcattttaactgcatcttatcctcaaaatataatgaccatttaggatagagnnnnnnnnnnnnnnnnnnnnnnnnnnataaccttaaagggttattttaaaataatctatggactaccatttggccctcattagcttcagcatggtgtgacttctctaataatatgcttagattaagcaaggaaaagatgcaaaaccacttcggggttaatcagtgaaatatttttcccttcgttgcataccagatacccccgggtgttgcacgactatttttattctgctaatttatgacaagtgttaaacagaacaaggaattattccaacaagttatgcaacatgttgcttattttcaaattacagtttaatgtctaggtgccagcccttgatatagctatttttgtaagaacatcctcctggactttgggttagttaaatctaaacttatttaaggattaagtaggataacgtgcattgatttgctaaaagaatcaagtaataattacttagctgattcctgagggtggtatgacttctagctgaactcatcttgatcggtaggattttttaaatccatttttgtaaaactatttccaagaaattttaagccctttcacttcagaaagaaaaaagttgttggggctgagcacttaattttcttgagcaggaaggagtttcttccaaacttcaccatctggatactggtgtttctttacagattcctccttcatttctgttgagtagccgggatccttgggaggcatgtaggaagcccgctggatcatcacgggatacttgaaatgctcatgcaggtggtcaacatactcacacaccctaggaggagggaatcagatcggggcaatgatgcctgaagtcagattattcacgtggtgctaacttaaagcagaaggagcgagtaccactcaattgacagtgttggccaaggcttagctgtgttaccatgcgtttctaggcaagtccctaaacctctgtgcctcaggtccttttcttctaaaatatagcaatgtgaggtggggactttgatgacatgaacacacgaagtccctctagaggttttgtggtgccctttaaaagggatcaattcagactctgtaaatatccagaattatttgggttcctctggtcaaaagtcagatgaatagattaaaatcaccacattttgtgatctatttttcaagaagcgtttgtattttttcacatggctgcagcagctgccaggggcttggggtttttttggcaggtagggttgggagggccattttgtcactgcctcagctgggcatctaggaagcattagcactgtgaggctttctcggtacactttgtacctggaaaacaatccgaacaggtccatgggaccacaactgagggaggtgggacacacccacctccatccaagaaccaagacatctaaggaagcaaacccagatgcagaacaataaaatacattccatactccccacccaaaaaataaaatcaccaaatgaggttcctttcagctatacaaatgatttagatgaagagcagaggatttagaatcaggtcaatctgtgttcaggttctgtgttcctcgcagtcgaagaccgttgtata

SEQ ID NO: 201 - DNA, 10281 bp, Homo sapiens
  misc_feature: Incyte ID No: 026662.3
attgggcaccggtggcggctgcggggcagtttgaattagactctgggctccagcccgccgaagccgcgccagaactgtactctccgagaggtcgttttcccgtccccgagagcaagtttatttacaaatgttggagtaataaagaaggcagaacaaaatgagctgggctttggaagaatggaaagaagggctgcctacaagagctcttcagaaaattcaagagcttgaaggacagcttgacaaactgaagaaggaaaagcagcaaaggcagtttcagcttgacagtctcgaggctgcgctgcagaagcaaaaacagaaggttgaaaatgaaaaaaccgagggtacaaacctgaaaagggagaatcaaagattgatggaaatatgtgaaagtctggagaaaactaagcagaagatttctcatgaacttcaagtcaaggagtcacaagtgaatttccaggaaggacaactgaattcaggcaaaaaacaaatagaaaaactggaacaggaacttaaaaggtgtaaatctgagcttgaaagaagccaacaagctgcgcagtctgcagatgtctctctgaatccatgcaatacaccacaaaaaatttttacaactccactaacaccaagtcaatattatagtggttccaagtatgaagatctaaaagaaaaatataataaagaggttgaagaacgaaaaagattagaggcagaggttaaagccttgcaggctaaaaaagcaagccagactcttccacaagccaccatgaatcaccgcgacattgcccggcatcaggcttcatcatctgtgttctcatggcagcaagagaagaccccaagtcatctttcatctaattctcaaagaactccaattaggagagatttctctgcatcttacttttctggggaacaagaggtgactccaagtcgatcaactttgcaaatagggaaaagagatgctaatagcagtttctttgacaattctagcagtcctcatcttttggatcaattaaaagcgcagaatcaagagctaagaaacaagattaatgagttggaactacgcctgcaaggacatgaaaaagaaatgaaaggccaagtgaataagtttcaagaactccaactccaactggagaaagcaaaagtggaattaattgaaaaagagaaagttttgaacaaatgtagggatgaactagtgagaacaacagcacaatacgaccaggcgtcaaccaagtatactgcattggaacaaaaactgaaaaaattgacggaagatttgagttgtcagcgacaaaatgcagaaagtgccagatgttctctggaacagaaaattaaggaaaaagaaaaggagtttcaagaggagctctcccgtcaacagcgttctttccaaacactggaccaggagtgcatccagatgaaggccagactcacccaggagttacagcaagccaagaatatgcacaacgtcctgcaggctgaactggataaactcacatcagtaaagcaacagctagaaaacaatttggaagagtttaagcaaaagttgtgcagagctgaacaggcgttccaggcgagtcagatcaaggagaatgagctgaggagaagcatggaggaaatgaagaaggaaaacaacctccttaagagtcactctgagcaaaaggccagagaagtctgccacctggaggcagaactcaagaacatcaaacagtgtttaaatcagagccagaattttgcagaagaaatgaaagcgaagaatacctctcaggaaaccatgttaagagatcttcaagaaaaaataaatcagcaagaaaactccttgactttagaaaaactgaagcttgctgtggctgatctggaaaagcagcgagattgttctcaagaccttttgaagaaaagagaacatcacattgaacaacttaatgataagttaagcaagacagagaaagagtccaaagccttgctgagtgctttagagttaaaaaaaaaagaatatgaattgaaagaagagaaaactctgttttcttgttggaaaagtgaaaacgaaaaacttttaactcagatggaatcagaaaaggaaaacttgcagagtaaaattaatcacttggaaacttgtctgaagacacagcaaataaaaagtcatgaatacaacgagagagtaagaacgctggagatggacagagaaaacctaagtgtcgagatcagaaaccttcacaacgtgttagacagtaagtcagtggaggtagagacccagaaactagcttatatggagctacagcagaaagctgagttctcagatcagaaacatcagaaggaaatagaaaatatgtgtttgaagacttctcagcttactgggcaagttgaagatctagaacacaagcttcagttactgtcaaatgaaataatggacaaagaccggtgttaccaagacttgcatgccgaatatgagagcctcagggatctgctaaaatccaaagatgcttctctggtgacaaatgaagatcatcagagaagtcttttggcttttgatcagcagcctgccatgcatcattcctttgcaaatataattggagaacaaggaagcatgccttcagagaggagtgaatgtcgtttagaagcagaccaaagtccgaaaaattctgccatcctacaaaatagagttgattcacttgaattttcattagagtctcaaaaacagatgaactcagacctgcaaaagcagtgtgaagagttggtgcaaatcaaaggagaaatagaagaaaatctcatgaaagcagaacagatgcatcaaagttttgtggctgaaacaagtcagcgcattagtaagttacaggaagacacttctgctcaccagaatgttgttgctgaaaccttaagtgcccttgagaacaaggaaaaagagctgcaacttttaaatgataaggtagaaactgagcaggcagagattcaagaattaaaaaagagcaaccatctacttgaagactctctaaaggagctacaacttttatccgaaaccctaagcttggagaagaaagaaatgagttccatcatttctctaaataaaagggaaattgaagagctgacccaagagaatgggactcttaaggaaattaatgcatccttaaatcaagagaagatgaacttaatccagaaaagtgagagttttgcaaactatatagatgaaagggagaaaagcatttcagagttatctgatcagtacaagcaagaaaaacttattttactacaaagatgtgaagaaaccggaaatgcatatgaggatcttagtcaaaaatacaaagcagcacaggaaaagaattctaaattagaatgcttgctaaatgaatgcactagtctttgtgaaaataggaaaaatgagttggaacagctaaaggaagcatttgcaaaggaacaccaagaattcttaacaaaattagcatttgctgaagaaagaaatcagaatctgatgctagagttggagacagtgcagcaagctctgagatctgagatgacagataaccaaaacaattctaagagcgaggctggtggtttaaagcaagaaatcatgactttaaaggaagaacaaaacaaaatgcaaaaggaagttaatgacttattacaagagaatgaacagctgatgaaggtaatgaagactaaacatgaatgtcaaaatctagaatcagaaccaattaggaactctgtgaaagaaagagagagtgagagaaatcaatgtaattttaaacctcagatggatcttgaagttaaagaaatttctctagatagttataatgcgcagttggtgcaattagaagctatgctaagaaataaggaattaaaacttcaggaaagtgagaaggagaaggagtgcctgcagcatgaattacagacaattagaggagatcttgaaaccagcaatttgcaagacatgcagtcacaagaaattagtggccttaaagactgtgaaatagatgcggaagaaaagtatatttcagggcctcatgagttgtcaacaagtcaaaacgacaatgcacaccttcagtgctctctgcaaacaacaatgaacaagctgaatgagctagagaaaatatgtgaaatactgcaggctgaaaagtatgaactcgtaactgagctgaatgattcaaggtcagaatgtatcacagcaactaggaaaatggcagaagaggtagggaaactactaaatgaagttaaaatattaaatgatgacagtggtcttctccatggtgagttagtggaagacataccaggaggtgaatttggtgaacaaccaaatgaacagcaccctgtgtctttggctccattggacgagagtaattcctacgagcacttgacattgtcagacaaagaagttcaaatgcactttgccgaattgcaagagaaattcttatctttacaaagtgaacacaaaattttacatgatcagcactgtcagatgagctctaaaatgtcagagctgcagacctatgttgactcattaaaggccgaaaatttggtcttgtcaacgaatctgagaaactttcaaggtgacttggtgaaggagatgcagctgggcttggaggaggggctcgttccatccctgtcatcctcttgtgtgcctgacagctctagtcttagcagtttgggagactcctccttttacagagctcttttagaacagacaggagatatgtctcttttgagtaatttagaaggggctgtttcagcaaaccagtgcagtgtagatgaagtattttgcagcagtctgcaggaggagaatctgaccaggaaagaaaccccttcggccccagcgaagggtgttgaagagcttgagtccctctgtgaggtgtaccggcagtccctcgagaagctagaagagaaaatggaaagtcaagggattatgaaaaataaggaaattcaagagctcgagcagttattaagttctgaaaggcaagagcttgactgccttaggaagcagtatttgtcagaaaatgaacagtggcaacagaagctgacaagcgtgactctggagatggagtccaagttggcggcagaaaagaaacagacggaacaactgtcacttgagctggaagtagcacgactccagctacaaggtctggacttaagttctcggtctttgcttggcatcgacacagaagatgctattcaaggccgaaatgagagctgtgacatatcaaaagaacatacttcagaaactacagaaagaacaccaaagcatgatgttcatcagatttgtgataaagatgctcagcaggacctcaatctagacattgagaaaataactgagactggtgcattgaaacccacaggagagtgctctggggaacagtccccagataccaattatgagcctccaggggaagataaaacccagggctcttcagaatgcatttctgaattgtcattttctggtcctaatgctttggtacctatggatttcctggggaatcaggaagatatccataatcttcaactgcgggtaaaagagacatcaaatgagaatttgagattacttcatgtgatagaggaccgtgacagaaaagttgaaagtttgctaaatgaaatgaaagaattagactcaaaactccatttacaggaggtacaactaatgaccaaaattgaagcatgcatagaattggaaaaaatagttggggaacttaagaaagaaaactcagatttaagtgaaaaattggaatatttttcttgtgatcaccaggagttactccagagagtagaaacttctgaaggcctcaattctgatttagaaatgcatgcagataaatcatcacgtgaagatattggagataatgtggccaaggtgaatgacagctggaaggagagatttcttgatgtggaaaatgagctgagtaggatcagatcggagaaagctagcattgagcatgaagccctctacctggaggctgacttagaggtagttcaaacagagaagctatgtttagaaaaagacaatgaaaataagcagaaggttattgtctgccttgaagaagaactctcagtggtcacaagtgagagaaaccagcttcgtggagaattagatactatgtcaaaaaaaaccacggcactggatcagttgtctgaaaaaatgaaggagaaaacacaagagcttgagtctcatcaaagtgagtgtctccattgcattcaggtggcagaggcagaggtgaaggaaaagacggaactccttcagactttgtcctctgatgtgagtgagctgttaaaagacaaaactcatctccaggaaaagctgcagagtttggaaaaggactcacaggcactgtctttgacaaaatgtgagctggaaaaccaaattgcacaactgaataaagagaaagaattgcttgtcaaggaatctgaaagcctgcaggccagactgagtgaatcagattatgaaaagctgaatgtctccaaggccttggaggccgcactggtggagaaaggtgagttcgcattgaggctgagctcaacacaggaggaagtgcatcagctgagaagaggcatcgagaaactgagagttcgcattgaggccgatgaaaagaagcagctgcacatcgcagagaaactgaaagaacgcgagcgggagaatgattcacttaaggataaagttgagaaccttgaaagggaattgcagacgtcagaagaaaaccaggagctagtgattcttgatgccgagaattccaaagcagaagtagagactctaaaaacacaaatagaagagatggccagaagcctgaaagtttttgaattagaccttgtcacgttaaggtctgaaaaagaaaatctgacaaaacaaatacaagaaaaacaaggtcagttgtcagaactagacaagttactctcttcatttaaaagtctgttagaagaaaaggagcaagcagagatacagatcaaagaagaatctaaaactgcagtggagatgcttcagaatcagttaaaggagctaaatgaggcagtagcagccttgtgtggtgaccaagaaattatgaaggccacagaacagagtctagacccaccaatagaggaagagcatcagctgagaaatagcattgaaaagctgagagcccgcctagaagctaatgaaaagaagcagctctgtgtcttacaacaactgaaggaaagtgagcatcatgcagatttacttaagggtagagtggagaaccttgaaagagagctagagatagccaggacaaaccaagagcatgcagctcttgaggcagagaattccaaaggagaggtagagaccctaaaagcaaaaatagaagggatgacccaaagtctgagaggtctggaattagatgttgttactataaggtcagaaaaagaagatctgacaaatgaattacaaaaagagcaagagcgaatatctgaattagaaataataaattcatcatttgaaaatattttgcaagaaaaagagcaagagaaagtacagatgaaagaaaaatcaagcactgccatggagatgcttcaaacacaattaaaagagctcaatgagagagtggcagccctgcataatgaccaagaagcctgtaaggccaaagagcagaatcttagtagtcaagtagagtgtcttgaacttgagaaggctcagttgctacaaggccttgatgaggccaaaaataattatattgttttgcaatcttcagtgaatggcctcattcaagaagtagaagatggcaagcagaaactggagaagaaggatgaagaaatcagtagactgaaaaatcaaattcaagaccaagagcagcttgtctctaaactgtcccaggtggaaggagagcaccaactttggaaggagcaaaacttagaactgagaaatctgacagtggaattggagcagaagatccaagtgctacaatccaaaaatgcctctttgcaggacacattagaagtgctgcagagttcttacaagaatctagagaatgagcttgaattgacaaaaatggacaaaatgtcctttgttgaaaaagtaaacaaaatgactgcaaaggaaactgagctgcagagggaaatgcatgagatggcacagaaaacagcagagctgcaagaagaactcagtggagagaaaaataggctagctggagagttgcagttactgttggaagaaataaagagcagcaaagatcaattgaaggagctcacactagaaaatagtgaattgaagaagagcctagattgcatgcacaaagaccaggtggaaaaggaagggaaagtgagagaggaaatagctgaatatcagctacggcttcatgaagctgaaaagaaacaccaggctttgcttttggacacaaacaaacagtatgaagtagaaatccagacataccaagagaaattgacttctaaagaagaatgtctcagttcacagaagctggagatagaccttttaaagtctagtaaagaagagctcaataattcattgaaagctactactcagattttggaagaattgaagaaaaccaagatggacaatctaaaatatgtaaatcagttgaagaaggaaaatgaacgtgcccaggggaaaatgaagttgttgatcaaatcctgtaaacagctggaagaggaaaaggagatactgcagaaagaactctctcaacttcaagctgcacaggagaagcagaaaacaggtactgttatggataccaaggtcgatgaattaacaactgagatcaaagaactgaaagaaactcttgaagaaaaaaccaaggaggcagatgaatacttggataagtactgttccttgcttataagccatgaaaagttagagaaagctaaagagatgttagagacacaagtggcccatctgtgttcacagcaatctaaacaagattcccgagggtctcctttgctaggtccagttgttccaggaccatctccaatcccttctgttactgaaaagaggttatcatctggccaaaataaagcttcaggcaagaggcaaagatccagtggaatatgggagaatggtggaggaccaacacctgctaccccagagagcttttctaaaaaaagcaagaaagcagtcatgagtggtattcaccctgcagaagacacggaaggtactgagtttgagccagagggacttccagaagttgtaaagaaagggtttgctgacatcccgacaggaaagactagcccatatatcctgcgaagaacaaccatggcaactcggaccagcccccgcctggctgcacagaagttagcgctatccccactgagtctcggcaaagaaaatcttgcagagtcctccaaaccaacagctggtggcagcagatcacaaaaggtcaaagttgctcagcggagcccagtagattcaggcaccatcctccgagaacccaccacgaaatccgtcccagtcaataatcttcctgagagaagtccgactgacagccccagagagggcctgagggtcaagcgaggccgacttgtccccagccccaaagctggactggagtccaagggcagtgagaactgtaaggtccagtgaaggcactttgtgtgtcagtacccctgggaggtgccagtcattgaatagataaggctgtgcctacaggacttctctttagtcagggcatgctttattagtgaggagaaaacaattccttagaagtcttaaatatattgtactctttagatctcccatgtgtaggtattgaaaaagtttggaagcactgatcacctgttagcattgccattcctctactgcaatgtaaatagtataaagctatgtatataaagctttttggtaatatgttacaattaaaatgacaagcactatatcacaatctctgtttgtatgtgggttttacactaaaaaaatgcaaaacacattttattcttctaattaacagctcctaggaaaatgtagacttttgctttatgatattctatctgtagtatgaggcatggaatagttttgtatcgggaatttctcagagctgagtaaaatgaaggaaaagcatgttatgtgtttttaaggaaaatgtgcacacatatacatgtaggagtgtttatctttctcttacaatctgttttagacatctttgcttatgaaacctgtacatatgtgtgtgtgggtatgtgtttatttccagtgagggctgcaggcttcctagaggtgtgctataccatgcgtctgtcgttgtgcttttttctgtttttagaccaattttttacagttctttggtaagcattgtcgtatctggtgatggattaacatatagcctttgttttctaataaaatagtcgccttcgttttctgtaagaatg

SEQ ID NO: 202 - DNA, 2656 bp, Homo sapiens
  misc_feature: Incyte ID No: 977509.3
acctgctgacacgctgacgccttcgagcgcggcccggggcccggagcggccggagcagcccgggtcctgaccccggcccggctcccgctccgggctctgccggcgggcgggcgagcgcggcgcggtccgggccggggggatgtctcggcggacgcgctgcgaggatctggatgagctgcactaccaggacacagattcagatgtgccggagcagagggatagcaagtgcaaggtcaaatggacccatgaggaggacgagcagctgagggccctggtgaggcagtttggacagcaggactggaagttcctggccagccacttccctaaccgcactgcaccagcaatgcccagtacaggtggctgagagttttgaatccagaccttgtcaaggggccatggaccaaagaggaagaccaaaaagtcatcgagctggttaagaagtatggcacaaagcagtggacactgattgccaagcacctgaagggccggctggggaagcagtgccgtgaacgctggcacaaccacctcaaccctgaggtgaagaagtcttgctggaccgaggaggaggaccgcatcatctgcgaggcccacaaggtgctgggcaaccgctgggccgagatcgccaagatgttgccagggaggacagacaatgctgtgaagaatcactggaactctaccatcaaaaggaaggtggacacaggaggcttcttgagcgagtccaaagactgcaagcccccagtgtacttgctgctggagctcgaggacaaggacggcctccagagtgcccagcccacggaaggccagggaagtcttctgaccaactggccctccgtccctcctaccataaaggaggaggaaaacagtgaggaggaacttgcagcagccaccacatcgaaggaacaggagcccatcggtacagatctggacgcagtgcgaacaccagagcccttggaggaattcccgaagcgtgaggaccaggaaggctccccaccagaaacgagcctgccttacaagtgggtggtggaggcagctaacctcctcatccccgctgtgggttctagcctctctgaagccctggacttgatcgagtcggaccctgatgcttggtgtgacctgagtaaatttgacctccctgaggaaccatctgcagaggacagtatcaacaacagcctagtgcagctgcaagcgtcacatcagcagcaagtcctgccaccccgccagccttccgccctggtggcccagtgtgaccgagtaccgcctggatggccacaccatctcagacctgagccggagcagccggggcgagctgatccccatctcccccagcactgaagtcgggggctctggcattggcacaccgccctctgtgctcaagcggcagaggaagaggcgtgtggctctgtcccctgtcactgagaatagcaccagtctgtccttcctggattcctgtaacagcctcacgcccaagagcacacctgttaagaccctgcccttctcgccctcccagtttctgaacttctggaacaaacaggacacattggagctggagagcccctcgctgacatccaccccagtgtgcagccagaaggtggtggtcaccacaccactgcaccgggacaagacacccctgcaccagaaacatgctgcgtttgtaaccccagatcagaagtactccatggacaacactccccacacgccaaccccgttcaagaacgccctggagaagtacggacccctgaagcccctgccacagaccccgcacctggaggaggacttgaaggaggtgctgcgttctgaggctggcatcgaactcatcatcgaggacgacatcaggcccgagaagcagaagaggaagcctgggctgcggcggagccccatcaagaaagtccggaagtctctggctcttgacattgtggatgaggatgtgaagctgatgatgtccacactgcccaagtctctatccttgccgacaactgccccttcaaactcttccagcctcaccctgtcaggtatcaaagaagacaacagcttgctcaaccagggcttcttgcaggccaagcccgagaaggcagcagtggcccagaagccccgaagccacttcacgacacctgcccctatgtccagtgcctggaagacggtggcctgcggggggaccagggaccagcttttcatgcaggagaaagcccggcagctcctgggccgcctgaagcccagccacacatctcggaccctcatcttgtcctgaggtgttgagggtgtcacgagcccattctcatgtttacaggggttgtgggggcagagggggtctgtgaatctgagagtcattcaggtgacctcctgcagggagccttctgccaccagcccctccccagactctcaggtggaggcaacagggccatgtgctgccctgttgccgagcccagctgtgggcggctcctggtgctaacaacaaagttccacttccaggtctgcctggttccctccccaaggccacagggagctccgtcagcttctcccaagcccacgtcaggcctggcctcatctcagaccctgcttaggatgggggatgtggccaggggtgctcctgtgctcaccctctcttggtgcatttttttggaagaataaaattgcctctctctttaaaaaaaaaaaaaaa

SEQ ID NO: 203 - DNA, 1722 bp, Homo sapiens
  misc_feature: Incyte ID No: 221961.2
ggccatctacaatcaagattgagagtggctctaacaagtgccatttttccttgttagctttcatttctcagccctttacaagattaaaatagtctgcagtttaatctctccaaagctttacggacagtgattctgtcctaaacaagacagtgactccaggatttctgaagactattgtggaagaagcatccattaaggccaagctataacatcagaaatggtgaatgaatacaagaaaattcttttgctgaaaggatttgagctcatggatgattatcattttacatcaattaagtccttactggcctatgatttaggactaactacaaaaatgcaagaggaatacaacagaattaagattacagatttgatggaaaaaaagttccaaggcgttgcctgtctagacaaactaatagaacttgccaaagatatgccatcacttaaaaaccttgttaacaatcttcgaaaagagaagtcaaaagttgctaagaaaattaaaacacaagaaaaagctccagtgaaaaaaataaaccaggaagaagtgggtcttgcggcacctgcacccaccgcaagaaacaaactgacatcggaagcaagagggaggattcctgtagctcagaaaagaaaaactccaaacaaagaaaagactgaagccaaaaggaataaggtgtcccaagagcagagtaagcccccgggtccctcaggagccagcacatctgcagctgtggatcatcccccactaccccagacctcatcatcaactccatccaacacttcgtttactccgaatcaggaaacccaggcccaacggcaggtggatgcaagaagaaatgttccccaaaacgacccagtgacagtggtggtactgaaagcaacagcgccatttaaatacgagtccccagaaaatgggaaaagcacaatgtttcatgctacagtggccagtaagactcaatatttccatgtgaaagtcttcgacatcaacttgaaagagaaatttgtaaggaagaaggtcattaccatatctgattactctgaatgtaaaggagtaatggaaataaaggaagcatcatctgtgtctgactttaatcaaaattttgaggtcccaaacagaattatcgaaatagcaaataaaactcccaagatcagtcaactttacaagcaagcatctggaacaatggtgtatgggttgtttatgttacaaaagaaaagcgtacacaagaagaacacaatttatgaaatacaggataatacaggatccatggatgtagtggggagtggaaaatggcacaatatcaagtgtgagaaaggagataaacttcgactcttctgccttcaactgagaacagttgaccgcaagctgaaactggtgtgtggaagtcacagcttcatcaaggtcatcaaggccaagaaaaacaaggaaggaccaatgaatgttaattgaaatatgaaagctgaaatgcaacaaacaacttccgcttaaaacaattaagttgttaataactgtgattttgtaaatttcagtaattcatttaaatgatgtttcagtagatatattctagcatattaagagcttttataactgagttatagattagtttgctttctggaataaaattttcttcttatactcttccttttttttagatattacattttgcttttatgacattcacgaggcaaaaaataaaatatctttttttgaaggacaaaaaaaaaaaaaaa

SEQ ID NO: 204 - DNA, 835 bp, Homo sapiens
  misc_feature: Incyte ID No: 246824.1
gtttctgcatggccaagagccagaccctccctctgggctctgctggcccaacccaccaagggatgctttatttaaacagttccaagtaggggagaccagctgcccctgaaccccagaacaaccagctggatcagttctcacaggagctacagcgcggagactgggaaacatggttccaaaactgttcacttcccaaatttgtctgcttcttctgttggggcttctggctgtggagggctcactccatgtcaaacctccacagtttacctgggctcaatggtttgaaacccagcacatcaatatgacctcccagcaatgcaccaatgcaatgcaggtcattaacaattatcaacggcgatgcaaaaaccaaaatactttccttcttacaacttttgctaacgtagttaatgtttgtggtaacccaaatatgacctgtcctagtaacaaaactcgcaaaaattgtcaccacagtggaagccaggtgcctttaatccactgtaacctcacaactccaagtccacagaatatttcaaactgcaggtatgcgcagacaccagcaaacatgttctatatagttgcatgtgacaacagagatcaacgacgagaccctccacagtatccggtggttccagttcacctggatagaatcatctaagctcctgtatcagcactcctcatcatcactcatctgccaagctcctcaatcatagccaagatcccatctctccatatactttgggtatcagcatctgtcctcatcagtctccataccccttcagctttcctgagctgaagtgccttgtgaaccctgcaataaactgctttgcaaattcaa

SEQ ID NO: 205 - DNA, 2319 bp, Homo sapiens
  misc_feature: Incyte ID No: 407557.2
  unsure 2114: a, t, c, g, or other
ctctgccgagcctccttaaaactctgccgttaaaatgggggcgggtttttcaactcaaaaagcgctcaatttttttcttttcaaaaaaagctgatgaggtcggaaaaaagggagaagaaaccggcaccctctctgagaggcaacagaagcagcaattgtttcagcgaaaaaagcagcaagggagggagtgaaggaaaaaagcaaaaaagggggcgacacgcaagtgcctgtaggggtgaaaggagcagggaccggcgatctagggggggatcagctacaaaagaaactgtcactgggagcggtgcggccaaggaggaagcagtgctgccaggctctgctccagggcacagctggctggcggctgccctgtccgcagcaaaggggcacaggccggggaccgcgagaggtggcaaagtggcaccgggcgccgaggctgctgagcgctcgccgagacggcgaccggactggctgccccggaactgcggcgactctccctactcagaacttggcctacgtttcccaggactctccccatctccagaggcccccacaaaaccgggaaaggaaggaaaggacagcggcggcagcagctcaatgagtgcctacagcagaaagcctgaacgagctcggtcgtaggcgggaagttcccgggggggctgcccagtgcagccgcaatgctgccgcgagctgccccagcagtccgggctccgtagacgctttccgcatcactctccttcctcgggctgccgggagtcccgggacctggcggggccggcatgacgggcttctcgggggcccgccgcacgcccggcagcctccggagacgcgcgccgagcccggctcccacggcctctgaggctcggcggggctgcggctgcctggcgggcgggctccggagctttcctgagccggcattagcccacggcttggcccggacgcgaccaaaggctcttctggagaagcccagagcactgggcaatcgttacgacctgtaacttgagggccaccgaactgctactcccgttcgcctttggcgatgcatcttttaaccctccggagcacgtcagcatccagccaccgcggcgctctcccagcagcggaggacccaggactatcccttcggcgagacggatggaaaccgagccccctggaggacctgcccctgcagttctgcctcacacggctcaagtcaccaccgtgaacaagggaccctaaagaatggccgagccttgggggaacgagttggcgtccgcagctgccaggggggacctagagcaacttactagtttgttgcaaaataatgtaaacgtcaatgcacaaaatggatttggaaggactgcgctgcaggttatgaaacttggaaatcccgagattgccaggagactgctacttagaggtgctaatcccgatttgaaagaccgaactggtttcgctgtcattcatgatgcggccagagcaggtttcctggacactttacagactttgctggagtttcaagctgatgttaacatcgaggataatgaagggaacctgcccttgcacttggctgccaaagaaggtcacctccgggtggtggagttcctggtgaagcacacggccagcaatgtggggcatcggaaccataagggggacaccgcctgtgatttggccaggctctatgggaggaatgaggttgttagcctgatgcaggcaaacggggctgggggagccacaaatcttcaataaacgtggggagggctcccccacgttgcctctactttatcaattaactgagtagctctcctgacttttaatgtcatttgttaaaatacagttctgtcatatgttaagcagctaaattttctgaaactgcataagtgaaaatcttacaacaggcttatgaatatatttaagcaacatctttttaacctgcaaaatctgttctaacatgtaattgcagataactttgactttcttctgaatattttatctttccttggcttttcccttgcttccccttttgccaatctcaacacccaagttgaagactttgtttttaaaatggtttgtcctgatgcttttgtctaattaaaacactttcaaaacaggacaacatttttctgtgattttccctnctttagaacccatacacaacttatcacttgctaaggagaactgtactaaaagttattgaatgtcttaagtctttacactagaaaaggtagaccaactggaaaactagacatactctcttgatgattcagttgttttcatcctttacccatgtcacgtccaccttggtgcctagtatttctgctttaaaacaaaataaggacaact

SEQ ID NO: 206 - DNA, 1170 bp, Homo sapiens
  misc_feature: Incyte ID No: 372981.2
aagtaatcttagggattgtgggaaggcagctgaactcggcgcctggaaagatggaggcagcggagacagaggcggaagctgcagccctagaggtcctggctgaggtggcaggcatcttggaacctgtaggcctgcaggaggaggcagaactgccagccaagatcctggttgagtttgtggtggactctcagaagaaagacaagctgctctgcagccagcttcaggtagcggatttcctgcagaacatcctggctcaggaggacactgctaagggtctcgaccccttggcttctgaagacacgagccgacagaaggcaattgcagctaaggaacaatggaaagagctgaaggccacctacagggagcacgtagaggccatcaaaattggcctcaccaaggccctgactcagatggaggaagcccagaggaaacggacacaactccgggaagcctttgagcagctccaggccaagaaacaaatggccatggagaaacgcagagcagtccagaaccagtggcagctacaacaggagaagcatctgcagcatctggcggaggtttctgcagaggtgagggagcgtaagacagggactcagcaggagcttgacggggtgtttcagaaacttggaaacctgaagcagcaggcagaacaggagcgggacaagctgcagagggtaagctgttgttccctgaggctgaggctgaggcagagaatcttccagatgataaaccccagcagccgactcgaccccaggagcagagtacaggagacaccatggggagagaccctggtgtgtccttcaaggctgttggtctacaacctgctggagatgtaaatttgccatgacttcctggaggacagcagcatggagaaagatcctagaaaaggtcagacccaactcaggccttggtgtccctggactgcaagtgtggaaggagggaaagcctggtttacctctctctgcatctgagctctgctacccatggagcagatggatggtgggaacaggaaagagcttatgttacacctcattcccatgcttagcccacccagagctaacccctgtcttcttccccaggcctctgacttccctcacctcccaaccatcattacaggaaagactgtgaactcctgagttcagcttgatttctgactacatcccagcaagc

SEQ ID NO: 207 - DNA, 1382 bp, Homo sapiens
  misc_feature: Incyte ID No: 201409.6
gctggtttgccacaaaactccatcgtaactgaaagaggaaatcttctacaaattccagatttcactgctcccaccagcttggagacaacatgtggttcttgacaactctgctcctttgggttccagttgatgggcaagtggtagacaccacaaaggcagtgatcactttgcagcctccatgggtcagcgtgttccaagaggaaaccgtaaccttgcactgtgaggtgctccatctgcctggggagcagctccacacagtggtttctcaatggcacagccactcagacctcgacccccagctacagaatcacctctgccagtgtcaatgacagtggtgaatacaggtgccagagaggtctctcagggcgaagtgaccccatacagctggaaatccacagaggctggctactactgcaggtctccagcagagtcttcacggaaggagaacctctggccttgaggtgtcatgcgtggaaggataagctggtgtacaatgtgctttactatcgaaatggcaaagcctttaagtttttccactggaattctaacctcaccattctgaaaaccaacataagtcacaatggcacctaccattgctcaggcatgggaaagcatcgctacacatcagcaggaatatctgtcactgtgaaagagctatttccagctccagtgctgaatgcatctgtgacatccccactcctggaggggaatctggtcaccctgagctgtgaaacaaagttgctcttgcagaggcctggtttgcagctttacttctccttctacatgggcagcaagaccctgcgaggcaggaacacatcctctgaataccaaatactaactgctagaagagaagactctgggttatactggtgcgaggctgccacagaggatggaaatgtccttaagcgcagccctgagttggagcttcaagtgcttggcctccagttaccaactcctgtctggtttcatgtccttttctatctggcagtgggaataatgtttttagtgaacactgttctctgggtgacaatacgtaaagaactgaaaagaaagaaaaagtgggatttagaaatctctttggattctggtcatgagaagaaggtaatttccagccttcaagaagacagacatttagaagaagagctgaaatgtcaggaacaaaaagaagaacagctgcaggaaggggtgcaccggaaggagccccagggggccacgtagcagcggctcagtgggtggccatcgatctggaccgtcccctgcccacttgctccccgtgagcactgcgtacaaacatccaaaagttcaacaacaccagaactgtgtgtctcatggtatgtaactcttaaagcaaataaatgaactgacttcaactgggaaaaaaa

SEQ ID NO: 208 - DNA, 2865 bp, Homo sapiens
  misc_feature: Incyte ID No: 331025.1
gcggcggtttacgcggcgttaagacttcgtagggttagcgaaattgaggtttcttggtattgcgcgtttctcttccttgctgactctccgaatggccatggactcgtcgcttcaggcccgcctgtttcccggtctcgctatcaagatccaacgcagtaatggtttaattcacagtgccaatgtaaggactgtgaacttggagaaatcctgtgtttcagtggaatgggcagaaggaggtgccacaaagggcaaagagattgattttgatgatgtggctgcaataaacccagaactcttacagcttcttcccttacatccgaaggacaatctgcccttgcaggaaaatgtaacaatccagaaacaaaaacggagatccgtcaactccaaaattcctgctccaaaagaaagtcttcgaagccgctccactcgcatgtccactgtctcagagcttcgcatcacggctcaggagaatgacatggaggtggagctgcctgcagctgcaaactcccgcaagcagttttcagttcctcctgcccccactaggccttcctgccctgcagtggctgaaataccattgaggatggtcagcgaggagatggaagagcaagtccattccatccgaggcagctcttctgcaaaccctgtgaactcagttcggaggaaatcatgtcttgtgaaggaagtggaaaaaatgaagaacaagcgagaagagaagaaggcccagaactctgaaatgagaatgaagagagctcaggagtatgacagtagttttccaaactgggaatttgcccgaatgattaaagaatttcgggctactttggaatgtcatccacttactatgactgatcctatcgaagagcacagaatatgtgtctgtgttaggaaacgcccactgaataagcaagaattggccaagaaagaaattgatgtgatttccattcctagcaagtgtctcctcttggtacatgaacccaagttgaaagtggacttaacaaagtatctggagaaccaagcattctgctttgactttgcatttgatgaaacagcttcgaatgaagttgtctacaggttcacagcaaggccactggtacagacaatctttgaaggtggaaaagcaacttgttttgcatatggccagacaggaagtggcaagacacatactatgggcggagacctctctgggaaagcccagaatgcatccaaagggatctatgccatggcctcccgggacgtcttcctcctgaagaatcaaccctgctaccggaagttgggcctggaagtctatgtgacattcttcgagatctacaatgggaagctgtttgacctgctcaacaagaaggccaagctgcgcgtgctggaggacggcaagcaacaggtgcaagtggtggggctgcaggagcatctggttaactctgctgatgatgtcatcaagatgatcgacatgggcagcgcctgcagaacctctgggcagacatttgccaactccaattcctcccgctcccacgcgtgcttccaaattattcttcgagctaaagggagaatgcatggcaagttctctttggtagatctggcagggaatgagcgaggcgcggacacttccagtgctgaccggcagacccgcatggagggcgcagaaatcaacaagagtctcttagccctgaaggagtgcatcagggccctgggacagaacaaggctcacaccccgttccgtgagagcaagctgacacaggtgctgagggactccttcattggggagaactctaggacttgcatgattgccacgatctcaccaggcataagctcctgtgaatatactttaaacaccctgagatatgcagacagggtcaaggagctgagcccccacagtgggcccagtggagagcagttgattcaaatggaaacagaagagatggaagcctgctctaacggggcgctgattccaggcaatttatccaaggaagaggaggaactgtcttcccagatgtccagctttaacgaagccatgactcagatcagggagctggaggagaaggctatggaagagctcaaggagatcatacagcaaggaccagactggcttgagctctctgagatgaccgagcagccagactatgacctggagacctttgtgaacaaagcggaatctgctctggcccagcaagccaagcatttctcagccctgcgagatgtcatcaaggccttgcgcctggccatgcagctggaagagcaggctagcagacaaataagcagcaagaaacggccccagtgacgactgcaaataaaaatctgtttggtttgacacccagcctcttccctgggccctccccagagaactttgggtacctggtgggtctaggcagggtctgagctgggacaggttctggtaaatgccaagtatgggggcatctgggcccagggcagctggggagggggtcagagtgacatgggacactccttttctgttcctcagttgtcgccctcacgagaggaaggagctcttagttacccttttgtgttgcccttctttccatcaaggggaatgttctcagcatagagctttctccgcagcatcctgcctgcgtggactggctgctaatggagagctccctggggttgtcctggctctggggagagagacggagcctttagtacagctatctgctggctctaaaccttctacgcctttgggccgagcactgaatgtcttgtactttaaaaaaatgtttctgagacctctttctactttactgtctccctagagatcctagaggatccctactgttttctgttttatgtgtttatacattgtatgtaacaataaagagaaaaaataaatcagctgtttaagtgtgtggaaaaaaaaaa

SEQ ID NO: 209 - DNA, 1044 bp, Homo sapiens
  misc_feature: Incyte ID No: 247515.1
ggagggcgctggccggccgtggggcaatgcaacggcctcccagcacagggctataagaggagccgggcgggcacggaggggcagagaccccggagccccagccccaccatgaccctcggccgccgactcgcgtgtcttttcctcgcctgtgtcctgccggccttgctgctggggggcaccgcgctggcctcggagattgtggggggccggcgagcgcggccccacgcgtggcccttcatggtgtccctgcagctgcgcggaggccacttctgcggcgccaccctgattgcgcccaacttcgtcatgtcggccgcgcactgcgtggcgaatgtaaacgtccgcgcggtgcgggtggtcctgggagcccataacctctcgcggcgggagcccacccggcaggtgttcgccgtgcagcgcatcttcgaaaacggctacgaccccgtaaacttgctcaacgacatcgtgattctccagctcaacgggtcggccaccatcaacgccaacgtgcaggtggcccagctgccggctcagggacgccgcctgggcaacggggtgcagtgcctggccatgggctggggccttctgggcaggaaccgtgggatcgccagcgtcctgcaggagctcaacgtgacggtggtgacgtccctctgccgtcgcagcaacgtctgcactctcgtgaggggccggcaggccggcgtctgtttcggggactccggcagccccttggtctgcaacgggctaatccacggaattgcctccttcgtccggggaggctgcgcctcagggctctaccccgatgcctttgccccggtggcacagtttgtaaactggatcgactctatcatccaacgctccgaggacaacccctgtccccacccccgggacccggacccggccagcaggacccactgagaagggctgcccgggtcacctcagctgcccacacccacactctccagcatctggcacaataaacattctctgttttgtagaatgtgtttgatgctccttggctgtgtgattgggtgttgaaaatggtcagta

SEQ ID NO: 210 - DNA, 1505 bp, Homo sapiens
  misc_feature: Incyte ID No: 199471.2
caggaaggctgagagaaagggcaggtccccgctgcgtggggctgggcttaaaggctcgtcgcgcctgccaaaggacctgacgacgtgctgcgtcgttacttttgaaacgcttggcggggaagtgctgttggagccgctgtggttgctgtccgcggagtggaagcgccgtgcttttgtttgtgtccctggccatggcgctgcagctctcccgggagcagggaatcaccctgcgcgggagcgccgaaatcgtggccgagttcttctcattcggcatcaacagcattttatatcagcgtggcatatatccatctgaaacctttactcgagtgcagaaatacggactcaccttgcttgtaactactgatcttgagctcataaaatacctaaataatgtggtggaacaactgaaagattggttatacaagtgttcagttcagaaactggttgtagttatctcaaatattgaaagtggtgaggtcctggaaagatggcagtttgatattgagtgtgacaagactgcaaaagatgacagtgcacccagagaaaagtctcagaaagctatccaggatgaaatccgttcagtgatcagacagatcacagctacggtgacatttctgccactgttggaagtttcttgttcatttgatctgctgatttatacagacaaagatttggttgtacctgaaaaatgggaagagtcgggaccacagtttattaccaattctgaggaagtccgccttcgttcatttactactacaatccacaaagtaaatagcatggtggcctacaaaattcctgtcaatgactgaggatgacatgaggaaaataatgtaattgtaattttgaaatgtggttttcctgaaatcaggtcatctatagttgatatgttttatttcattggttaatttttacatggagaaaaccaaaatgatacttactgaactgtgtgtaattgttccttttatttttttggtacctatttgacttaccatggagttaacatcatgaatttattgcacattgttcaaaaggaaccaggaggtttttttgtcaacattgtgatgtatattcctttgaagatagtaactgtagatggaaaaacttgtgctataaagctagatgctttcctaaatcagatgttttggtcaagtagtttgactcagtataggtagggagatatttaagtataaaatacaacaaaggaagtctaaatattcagaatctttgttaaggtcctgaaagtaactcataatctataaacaatgaaatattgctgtatagctccttttgaccttcatttcatgtatagttttccctattgaatcagtttccaattatttgactttaatttatgtaacttgaacctatgaagcaatggatatttgtactgtttaatgttctgtgatacagaactcttaaaaatgttttttcatgtgttttataaaatcaagttttaagtgaaagtgaggaaataaagttaagtttgttttaaatttgtcttaaaa

SEQ ID NO: 211 - DNA, 1211 bp, Homo sapiens
  misc_feature: Incyte ID No: 2916753
  unsure 715: a, t, c, g, or other
tggcccgtggcctagctcgtcaagttgccgtggcgcggagaactctgcaaaacaagaggctgaggattgcgttagagataaaccagttcacgccggagccccgtgagggaagcgtctccgttgggtccggccgctctgcggggactctgaggaaaagctcgcaccaggtggacgcggatctgtcaacatgggtaaaggagaccccaacaagccgcggggcaaaatgtcctcgtacgccttcttcgtgcagacctgccgggaagagcacaagaagaaacacccggactcttccgtcaatttcgcggaattctccaagaagtgttcggagagatggaagaccatgtctgcaaaggagaagtcgaagtttgaagatatggcaaaaagtgacaaagctcgctatgacagggagatgaaaaattacgttcctcccaaagatctgccttcttcctgttttgctctgaacatcgcccaaagatcaaaagtgaacaccctggcctatccattggggatactgcaaagaaattgggtgaaatgtggtctgagcagtcagccaaagataaacaaccatatgaacagaaagcagctaagctaaaggagaaatatgaaaaggatattgctgcatatcgtgccaagggcaaaagtgaagcaggaaagaagggccctggcaggccaacaggctcaaagaagaagaacgaaccagaagatgaggaggagnaggaggaagaagaagatgaagatgaggaggaagaggatgaagatgaagaataaatggctatcctttaatgatgcgtgtggaatgtgtgtgtgtgctcaggcaattattttgctaagaatgtgaattcaagtgcagctcaatactagcttcagtataaaaactgtacagatttttgtatagctgataagattctctgtagagaaaatacttttaaaaaatgcaggttgtagctttttgatgggctactcatacagttagattttacagcttctgatgttgaatgttcctaaatatttaatggtttttttaatttcttgtgtatggtagcacagcaaacttgtaggaattagtatcaatagtaaattttgggttttttaggatgttgcatttcgtttttttaaaaaaaattttgtaataaaattatgtatattatttctattgtctttgtcttaatatgctaagttaattttcactttaaaaaagccatttgaagacc

SEQ ID NO: 212 - DNA, 3045 bp, Homo sapiens
  misc_feature: Incyte ID No: 343899.2
tgtcgaggagtgccagtcaccttcagtttctggagctggccgtcaacatgtcctttcctaaggcgcccttgaaacgattcaatgacccttctggttgtgcaccatctccaggtgcttatgatgttaaaactttagaagtattgaaaggaccagtatcctttcagaaatcacaaagatttaaacaacaaaaagaatctaaacaaaatcttaatgttgacaaagatactaccttgcctgcttcagctagaaaagttaagtcttcggaatcaaagaaggaatctcaaaagaatgataaagatttgaagatattagagaaagagattcgtgttcttctacaggaacgtggtgcccaggacaggcggatccaggatctggaaactgagttggaaaagatggaagcaaggctaaatgctgcactaagggaaaaaacatctctctctgcaaataatgctacactggaaaaacaacttattgaattgaccaggactaatgaactactaaaatctaagttttctgaaaatggtaaccagaagaatttgagaattctaagcttggagttgatgaaacttagaaacaaaagagaaacaaagatgaggggtatgatggctaagcaagaaggcatggagatgaagctgcaggtcacccaaaggagtctcgaagagtctcaagggaaaatagcccaactggagggaaaacttgtttcaatagagaaagaaaagattgatgaaaaatctgaaacagaaaaactcttggaatacatcgaagaaattagttgtgcttcagatcaagtggaaaaatacaagctagatattgcccagttagaagaaaatttgaaagagaagaatgatgaaattttaagccttaagcagtctcttgaggagaatattgttatattatctaaacaagtagaagatctaaatgtgaaatgtcagctgcttgaaaaagaaaaagaagaccatgtcaacaggaatagagaacacaacgaaaatctaaatgcagagatgcaaaacttaaaacagaagtttattcttgaacaacaggaacgtgaaaagcttcaacaaaaagaattacaaattgattcacttctgcaacaagagaaagaattatcttcgagtcttcatcagaagctctgttcttttcaagaggaaatggctaaagagaagaatctgtttgaggaagaattaaagcaaacactggatgagcttgataaattacagcaaaaggaggaacaagctgaaaggctggtcaagcaattggaagaggaagcaaaatctagagctgaagaattaaaactcctagaagaaaagctgaaagggaaggaggctgaactggagaaaagtagtgctgctcatacccaggccaccctgcttttgcaggaaaagtatgacagtatggtgcaaagccttgaagatgttactgctcaatttgaaagctataaagcgttaacagccagtgagatagaagatcttaagctggagaactcatcattacaggaaaaagcggccaaggctgggaaaaatgcagaggatgttcagcatcagattttggcaactgagagctcaaatcaagaatatgtaaggatgcttctagatctgcagaccaagtcagcactaaaggaaacagaaattaaagaaatcacagtttcttttcttcaaaaaataactgatttgcagaaccaactcaagcaacaggaggaagactttagaaaacagctggaagatgaagaaggaagaaaagctgaaaaagaaaatacaacagcagaattaactgaagaaattaacaagtggcgtctcctctatgaagaactatataataaaacaaaaccttttcagctacaactagatgcttttgaagtagaaaaacaggcattgttgaatgaacatggtgcagctcaggaacagctaaataaaataagagattcatatgctaaattattgggtcatcagaatttgaaacaaaaaatcaagcatgttgtgaagttgaaagatgaaaatagccaactcaaatcggaagtatcaaaactccgctgtcagcttgctaaaaaaaaacaaagtgagacaaaacttcaagaggaattgaataaagttctaggtatcaaacactttgatccttcaaaggcttttcatcatgaaagtaaagaaaattttgccctgaagaccccattaaaagaaggcaatacaaactgttaccgagctcctatggagtgtcaagaatcatggaagtaaacatctgagaaacctgttgaagattatttcattcgtcttgttgttattgatgttgctgttattatatttgacatgggtattttataatgttgtatttaattttaactgccaatccttaaatatgtgaaaggaacattttttaccaaagtgtcttttgacattttattttttcttgcaaatacctcctccctaatgctcacctttatcacctcattctgaaccctttcgctggctttccagcttagaatgcatctcatcaacttaaaagtcagtatcatattattatcctcctgttctgaaaccttagtttcaagagtctaaaccccagattcttcagcttgatcctggaggtcttttctagtctgagcttctttagctaggctaaaacaccttggcttgttattgcctctactttgattctgataatgctcacttggtcctacctattatccttctacttgtccagttcaaataagaaataaggacaagcctaacttcatagaaacctctctatttttaatcagttgtttaataatttacaggttcttaggctccatcctgtttgtatgaaattataatctgtggattggcctttaagcctgcattcttaacaaactcttcagttaattcttagatacactaaaaatctgagaaactctacatgtaactatttcttcagagtttgtcatatactgcttgtcatctgcatgtctactcagcatttgattaacatttgtgtaatatgaaataaaattacacagtaagtcatttaaaaaaaaaaaaaatttaaagatcaacatgtggttaaaaaaaaaaaaaa

SEQ ID NO: 213 - DNA, 3023 bp, Homo sapiens
  misc_feature: Incyte ID No: 335775.2
  unsure 2895, 2897, 2952, 2969: a, t, c, g, or other
cgcgagcaggagacggcggcggcgcgaaccctgctgggcctccagtcaccctcgtcttgcattttcccgcgtgcgtgtgtgagtgggtgtgtgtgttttcttacaaagggtatttcgcgatcgatcgattgattcgtagttcccccccgcgcgcctttgccctttgtgctgtaatcgagctcccgccatcccaggtgcttctccgttcctctaaacgccagcgtctggacgtgagcgcaggtcgccggtttgtgccttcggtccccgcttcgccccctgccgtcccctccttatcacggtcccgctcgcggcctcgccgccccgctgtctccgccgcccgccatggcgactgcgacccccgtgccgccgcggatgggcagccgcgctggcggccccaccacgccgctgagccccacgcgcctgtcgcggctccaggagaaggaggagctgcgcgagctcaatgaccggctggcggtgtacatcgacaaggtgcgcagcctggagacggagaacagcgcgctgcagctgcaggtgacggagcgcgaggaggtgcgcggccgtgagctcaccggcctcaaggcgctctacgagaccgagctggccgacgcgcgacgcgcgctcgacgacacggcccgcgagcgcgccaagctgcagatcgagctgggcaagtgcaaggcggaacacgaccagctgctcctcaactatgctaagaaggaatctgatcttaatggcgcccagatcaagcttcgagaatatgaagcagcactgaattcgaaagatgcagctcttgctactgcacttggtgacaaaaaaagtttagagggagatttggaggatctgaaggatcagattgcccagttggaagcctccttagctgcagccaaaaaacagttagcagatgaaactttacttaaagtagatttggagaatcgttgtcagagccttactgaggacttggagtttcgcaaaagcatgtatgaagaggagattaacgagaccagaaggaagcatgaaacgcgcttggtagaggtggattctgggcgtcaaattgagtatgagtacaagctggcgcaagcccttcatgagatgagagagcaacatgatgcccaagtgaggctgtataaggaggagctggagcagacttaccatgccaaacttgagaatgccagactgtcatcagagatgaatacttctactgtcaacagtgccagggaagaactgatggaaagccgcatgagaattgagagcctttcatcccagctttctaatctacagaaagagtctagagcatgtttggaaaggattcaagaattagaggacttgcttgctaaagaaaaagacaactctcgtcgcatgctgacagacaaagagagagagatggcggaaataagggatcaaatgcagcaacagctgaatgactatgaacagcttcttgatgtaaagttagccctggacatggaaatcagtgcttacaggaaactcttagaaggcgaagaagagaggttgaagctgtctccaagcccttcttcccgtgtgacagtatcccgagcatcctcaagtcgtagtgtacgtacaactagaggaaagcggaagagggttgatgtggaagaatcagaggcgagtagtagtgttagcatctctcattccgcctcagccactggaaatgtttgcatcgaagaaattgatgttgatgggaaatttatccgcttgaagaacacttctgaacaggatcaaccaatgggaggctgggagatgatcagaaaaattggagacacatcagtcagttataaatatacctcaagatatgtgctgaaggcaggccagactgttacaatttgggctgcaaacgctggtgtcacagccagccccccaactgacctcatctggaagaaccagaactcgtggggcactggcgaagatgtgaaggttatattgaaaaattctcagggagaggaggttgctcaaagaagtacagtctttaaaacaaccatacctgaagaagaggaggaggaggaagaagcagctggagtggttgttgaggaagaacttttccaccagcagggaaccccaagagcatccaatagaagctgtgcaattatgtaaaattttcaactgtcttcctcaaaataaagaaatatggtaatccttacctgtatacagtgcagagccttctcagaagcacagaatatttttatatttcctttatgtgaatttttaagctgcaaatctgatggccttaatttcctttttgacactgaaagttttgtaaaagaaatcatgtccatacactttgttgcaagatgtgaattattgacactgaacttaataactgtgtactgtttggaaggggttcctcaaattttttgactttttttgtatgtgtgttttttctttttttttaagttcttatgaggaggggagggtaaataaaccactgtgcgtcttggtgtaatttgaagattgccccatctagactagcaatctcttcattattctctgctatatataaaacggtgctgtgagggaggggaaaagcatttttcaatatattgaacttttgtactgaatttttttgtaataagcaatcaaggttataattttttttaaaatagaaattttgtaagaaggcaatattaacctaatcaccatgtaagcactctggatgatggattccacaaaacttggttttatggttacttcttctcttagattcttaattcatgaggagggtgggggagggaggtggagggagggaagggtttctctattaaaatgcattcgttgtgttttttaagatagtgtaacttgcttaaatttcttatgtgacattaacaaataaaaaagctcttttaatattgatatactgtcctttttaacgctttaaaaacagatttngnggggagaaaagtattgtttcagttttgcttttgataaaaatataatttgacttcnttgaactggatttttcnttaaggctttgccagtggaagataagctattttgggggtctttcagtatttaat

SEQ ID NO: 214 - DNA, 646 bp, Homo sapiens
  misc_feature: Incyte ID No: 232714.5
gcaaagcatttcttcaaatgtccacagtgtaacaatcgaaaagagtttcctcaagaaatgctgagaatgggaattcatattccagacagactacatacctgaaaactcaggggacatcccttgctgcagcagcaccttccaccctgaggaacatttctgcagagacaacaccttggaagagaatccgggcctttcttggactgattggccagaaccttccttattagaaaagccagagtcctctcgtggcaggaggagctactcctggaggtccaagggtgtcagaatcactaacagctgcaaaaaatccaagtaacaccttctgagtagctgctgtcccacacaatagggtatgaagctgcgctcctccatcgggtttggggagggagcactctgggactgtgagacaaggaagcagggccagcagtgagactatgagccaagcaaagagaagtctcagtggagcatgaggagggagcagtccagatgccaacaaggaaatgcgtttatggctacaagagtgcctctgctttctcctcctctcctcccaccaaggattcttccaccttaatcttgttttcatatgcctcttcttacttcacccatgtttgttgttatgcaaataaaggttttctctccaaaaaaa

SEQ ID NO: 215 - DNA, 1398 bp, Homo sapiens
  misc_feature: Incyte ID No: 305039.4
tcagctttcctaggtttgcgctagattatccacgatggtaatgcaatgctgggtctcttttcctcccagcttctcttccaggatcttcagggtcaagctatgctgtggcataaggtgacaatgttcgtggggaaacaggctttgagcaggatgcccctttcccggttgcagtccagctcctggataaatccataccaatagatgactaagcctggcccaaattctcttcctgtgatgatttgagatgataaaatgtccacatgatgagatgaagtgaggtgaatgactcaggcctggtgatggaatgggaaattccagagataatttgcacgtgcgctaagctgcggctacccccgcaagcaaccttccaagtccttcgtggcaatggtgcttccgtggggaccgtgctcatgttccgctgcccctccaaccaccagatggtggggtctgggctcctcacctgcacctggaaggggagcatcgctgagtggtcttcagggtccccagtgtgcaaactggtgccaccacacgagacctttggcttcaaggtggccgtgatcgcctccattgtgagctgtgccatcatcctgctcatgtccatggccttcctcacctgctgcctcctcaagtgcgtgaagaagagcaagcggcggcgctccaacaggtcagcccagctgtggtcccagctgaaagatgaggacttggagacggtgcaggccgcataccttggcctcaagcacttcaacaaacccgtgagcgggcccagccaggcgcacgacaaccacagcttcaccacagaccatggtgagagcaccagcaagctggccagtgtgacccgcagcgtggacaaggaccctgggatccccagagctctaagcctcagtggctcctccagctcaccccaagcccaggtgatggtgcacatggcaaaccccagacagcccctgcctgcctctgggctggccacaggaatgccacaacagcccgcagcatatgccctagggtgaccacgcagtgaggctggtgcccatgctccacactgggaggccaggctgaccccaccagccagtcagctacaactccacatcaactccacatgcgcccagctcgagactgatgagtggaatcagcttccaggtgtagggaccccttgaggggccgagctgacatccaaggctgaggaccccagtggggagtgttctgttccggcatatcctggccgtaacgatttttatagttatggactacttgaaaccactactgagggtaatttactagctgtggcctcccactaactagcattcctttaaagagactgggaaatgttttaagcaaatctagttttgtataataaaataagaaaatagcaataaacttcttttcagcaactacagaaaa

SEQ ID NO: 216 - DNA, 655 bp, Homo sapiens
  misc_feature: Incyte ID No: 233603.2
  unsure 484-510: a, t, c, g, or other
gctcgagaagaaagaaagggaaagaaatatctttgctatttgtataaaaatggaaattttaacagcttagcctctagagagttactgaacgtggttaccttgggaatgtaaatagaactgcaaattaaaatgactggccacttcaactgggtaagggaaacagctgcaataaagcttcgtgaatatatatctccatcttgaaagttgtgttccacaaaggtttcgacctctttgtccaaaaatgcatattactcatttactcctttcataccttcattgtgaaattaaataacagactcacaagcacctggcactggtggcagacaaaaaggcctcaacattctgcagcaggccagaggaggaacgacgctgctacagtctttattagttccagtgctcaagcccaggtttctaaggtttgacaatattctgtaagttaaaatcatttccacacatacagagtagaatcctgtttttgtaagtnnnnnnnnnnnnnnnnnnnnnnnnnnntggaacattgtctggaaggatatacatgaaaatgttaagagttggggggggttgaattttaggcaattttaatttttttaacgtcttctggtttttctacaataaacatgaatcagttgtagaacctctaaaatgataatgttca

SEQ ID NO: 217 - DNA, 6637 bp, Homo sapiens
  misc_feature: Incyte ID No: 330930.1
  unsure 3142-3163, 5447-5733: a, t, c, g, or other
gcagtgtgagctgataattgcagtacaggttaacaatttgcaagtcaaaggcaacagaactggaccaagaaaattcataactttttgcttttgtttctactaagatgacatcatacatggctattgatggcagtgctcttcaggttcccttgcgtcagaagcccaggaggaaaactcaaggttttctcacgatgagtcggaggaggatatcgtgtaaagatctgggccatgctgactgccaagggtggctgtataagaaaaaggaaaagggaagtttcctaagcaacaaatggaaaaagttctgggtgatactgaaggggtcgtcactgtactggtatagcaatcaaatggcagagaaagctgatggatttgtcaacctgcctgatttcactgtggaaagagcatctgaatgcaagaaaaagcatgcttttaagatcagccatccacagatcaagaccttttattttgcagctgagaatgtgcaggaaatgaacgtgtggttaaataaacttggatcggctgtaatccatcaggaatccactacaaaggatgaagaatgttacagtgaaagtgaacaggaagatccagaaatagctgcggagacaccaccccctcctcacgcttcccagactcagtctttgactgcacagcaggcatcttcatcctcacccagcctgagtggaacgtcgtattctttctcttccctggaaaatacagtgaagacacccagcagttttccttcctccttatctaaagagagacaatccttgcctgacacagttaacagtttgtctgctgctgaagatgagggacaaccaataacgtttgctgtgcaagttcattcacctgtaccctcagaggcaggcatccacaaggccctggaaaacagttttgtcacatcagaaagtggatttttgaactctttatctagtgatgatacttcttcattgagtagcaatcatgaccatcttactgtcccagataagcctgctggatcaaagatcatggacaaagaagagacaaaagtgtctgaagatgatgaaatggagaagctgtacaaatcattagagcaagctagtctatctcctcttggggaccgacgaccttcgactaaaaaggagttgagaaaatcctttgttaagcggtgtaaaaatccatctataaacgagaaactccacaaaatccgaacattgaatagcacattaaagtgtaaagaacatgatctggccatgattaaccagttgctggatgacccgaagctgacagccaggaaatacagagagtggaaagtcatgaacaccctgctgatccaggacatctatcagcagcagcgggcttcgcctgcccctgatgacactgatgacaccccccaggaactcaagaaatcaccttcttctccctctgttgaaaattccatttgagacaaagtcagggttttctcctcttatattttatcacaagcaactcttcaagatgttgcaaaagcttacatttttccttaaaaggaaaactgaaacccagtccttcaagcatcagcttcccatctaaagatgcacgttagatgaagataatcaccgaatacaccagggctcctcatttcagtcgtaacgcatccattgagattggaatgattgaggtcagttgaaaggcgttttttgtgttcctactgggagctcacggtgatgtggggctctaggggggatgtgagaaatgtctcttctgttcattgctctccagagaatgctatggacaagaatcaaattttaccaggagtaattgcccatggaaacattctgtttttcaaaagaagaatgtacatattccacttgactgggaagctgtgtggcccaaatcactgtttgagtggaggaatgttttctagagcagtgactggaaggacaaacgtggtgttgcagaacaaaaattccttgcctttggtatggaatggtggtgccttttccatgtgatgagaaatgcttcatagacagtggcatgtgggagagctgaaggaggaggcgtgttccatattccactcattcaaaggacagcttggtgttttcacactttatgcaggttaggggatctgattaatgtttcctttccttacaacagctagagaaaacatctcatcacaattggagacctctacttcctttgagctttcctactcaatggtaggagataggaatatgttccgcaaagaatgtctactgctcttgtccttggctgtgatccctatacatagtgtgaatttatatccaggtttcccaggatcaatattgacaagacgactttggcatctgaattgttttaatatctttactcaaaaaaacaaaaaaacaaaaacccatggaagcaacaaaagagttaaacatgagggatttatttttgtatgtttatatgtcacttgtgtgctatgtgaatagctatgtttgttatttaaatatatttatagaagttcaaattactagtgtttaaaagatgatatactattatatattgtgcttagtatatatttgatgagtctatactttttgcttgagaaaaatagaaatactattgattcactggtgttatgatgttgcactgtgtctgaggaatgctcaggaaatcttgtgggaaaaaaatggggcatgcattcataatttttcattttcttccccaccccaacccccatgagctcttaaatttagatttctatctcttgtaagtcactcttttaaccagcaaaggactttcatcttagattatcctttctattaaataaactttaagctttgtgccatttatgcctgcaaaccttagaccaaaggcaacacaactaatgtcatcttttcattaaagactaatagaaatttagaaatcattgtgttaaagagagctatagagaaacaatatgaaagtcttcccttactaatcaccatgaatatttctcaccataggaataaccacaacccaccaagtacccatgttggccctgcctacccgtaacaaattgttcacacaacctattttgttttatagcttcaaagtgtggcttgacattcaatggaaggaaccacctgaattatatctgcaaacaaaatggaaatagttgttgaatagttccccaagctttactaagaagccttaatactctgtnnnnnnnnnnnnnnnnnnnnnncaaccttagcattaagaaataaaaacaaaaaacaagaagcaagttgtactgctagaaacttctctaagataagaggccaggccagtcagtttggcccagcaaacatgtgggtacttctccacctagggaagccactgaagatgagtttgacctgtggtgacctgacagagagaacattcagatcctcagattgcaccctgatgccctggtttaggaaagcagtgctttaaccttttgcccctggaaattactgattctttctgtgattagcagataccagaagggaaattatttaggattggcaatgtaaagagtattgaaggaacaacaaataacaatagcagaaataacagtgtgacataaagtgcccttccacctatttttctttggtttgcaacaccagcctgtagacttccagtttttcttaaattgaagagctccagacacttttgagcagggtttgtgaatagctttgaatgctttcctttggcttttcgtgaagacatatttccccagcctttcaactgtaaactcctttagtaccattgaaacttaaggcaaaaaagatccctgggattacttagccaaggcttaaatttatttttcaaagtcaagaacattagcctagaagtttttgctttgctagttaaagcttactttgcagagcttcccaaagtgaaagggaaactgaacttcacaattttgcacctggctttctggagccccattgcctgctcattcgtgtttttccccctgtaaattattttgcttttgaccaggttgtgctagaaagtagggctgcttctgtgagttctcagcctaggctgtggccactaagacgtgggtggggggatagacaggagtgagagggagagtgggtgacactttccgtgacacttaatgtaggaagacatgggcttctctctcttggcctcaagccacttttctggtccaaagaatattgggaaaactggattactttcagtatatttcttgagaccgggtcatctctgaaatgcatttggggtagtttcctggggtccaagggccaattcctatacccagtcctgcagtgtctgtgagctgtggaatgagagagaaaaccatggctgctcaggaaggaagtggagaatctctcagcacacgtagatccaaatctgtggcacctgctaaagattaggatttggagaggactcctctttggggttgtgaagaggaccttttccctctgttgttagcctgtagatccagaacggagcctgatgtgatgccttcactggttgatatattgcaaatagacactctgagccctgcattgcaagggcgtcttttgctttaaagaattcttagttttgccacaacagctcaaatctcagaataggatcaaaggcctagaaagactcctaaagtataggattacaaagactccaggaagcgtaagaaagagattgtgtttggagtcagatttcaatgtgaaacccatgccttacatttacacagcactttgtagtttgcaaattggtgtgttttcagccccctcccgctgccccatgctctgagatgattgtggattattacagtgaagtgcctggcccggagcccccagtgatgaagcaggaacttgagtctcaggactcccagcggctctctgcccatttcctcctctccgccccccacctcgcttcacctgttaccttgtgaagttgctgttggcacatagcccactaggaaaccaagaagtttgactgggagcgtgtgtttcattgcactgggcttagcatacggctggccctggtggctgtttggctaaattctccatttgaaacctaaagggccctctctgtgcttgagcacagtctcctcctagtggtcctgcctcaacctgctggcgggctgtctatggattggggtttcacctaatcatgctgtgtttcctttcttttctttctgtacattagactacttgggaggtgctgtgtgatccttggatgaaaaacatatatttaaagaaatggagagtgtttattttgtttgctttttgaggcatgtgctgtcaaatgttagagaccaaacttagtgattagaggttggtcctttgaccttcttctcttaattgcttttcatgtaatcatgataatttactcaggtagcactccagtcacaaacaatgtcacagagatgaaacagattcaaagaaaaaatatttttaagtcttttgaaaagaagtgctattcaaatttaagacatgtttaaattcataggtacattatctcttagtaagaannnnnnnnnnnnnnnnnnnnnnnnnnnnnnnnnnnnnnnnnnnnnnnnnnnnnnnnnnnnnnnnnnnnnnnnnnnnnnnnnnnnnnnnnnnnnnnnnnnnnnnnnnnnnnnnnnnnnnnnnnnnnnnnnnnnnnnnnnnnnnnnnnnnnnnnnnnnnnnnnnnnnnnnnnnnnnnnnnnnnnnnnnnnnnnnnnnnnnnnnnnnnnnnnnnnnnnnnnnnnnnnnnnnnnnnnnnnnnnnnnnnnnnnnnnnnnnnnnnnnnnnnnnnnnnnnnnnnnnnnnnnnnngaaagacagtattttgatatagccacatacatgatttaatgagtaatgttaagtacagaaaagctgccatatccacatagttttagggggcatttcttcttcagtctaacaagaatatgatgtccaattgtggttttccaatttatttctcttccaatttcttttgtatacctcacaggagaaattgaatcctagaactgggagatgactgccctgccccagggttttgtaatacataattgaaaataaaagtccctgaaactaaatgtttgcagcctgtatgaaatggactgtggaagggggataatttctctcctcacagaaagccactcgtctccttgaatgaggcattgagcagacacacgtttctctgtgtcgtggggcaggaagcaattcccttgcctcttcagcacatctcagttctttcccacatgaccccagaaccacatagaaaacattgaaaataatggattcttcattgtatttgaattttttttttttaacctttagcccaaaagggaagtgtgcctcgtggaaagagcaaatgccgtaaaatagaaaccaggagttttaatcgccatatattttaatgtgcttgcatgatgggaatgtgacttttagcactgcatggtgtttgggggcaagatattaatgtggaaatcttagcttaagttttactgtgctctcatcctgtgtcagctacccctctaaactgaaaaagaggcatggctcatttctctcctgctttatgtttttgaggttgacttgtaagataaaaataaaaataagaaaaaaatatatctaggcaaatgacatgaaaaaaaagttgaaatatactactggtgttcatttttgtcctgcagtgttgctttctcaaagaaataaacatgtggctggaaaaaaa

SEQ ID NO: 218 - DNA, 3326 bp, Homo sapiens
  misc_feature: Incyte ID No: 247289.1
tctagatctgtgccatgatccatacactggctaatagagtacataatttttccattttccattttttgtttttacttactactgaaggatctcagatgtaaaattatgtatttggtttgagatggccacttattgtccttaaaaatccatactgatatatgcagtcattttgaattggacagtgccttctctttttttttctcctcttcttccatctccctcacccatgcccccacccaatctaaagagacagtgctgtacactctcatagagatagagaagatctaaaaagttgagactactcaatccagttaacaacagcaggagcactagagtttgttcatttattctctctgtaaaacaagctgtgctttttttcttctgcctttaaaatgccacccgtgtattcaaaccatggccacttgatacttatgtagaatccatcgtgggctgatgcaagccctttatttaggcttagtgttgtgggcaccaatgtcgagcatcgttgtgacttgtgctgtatgattctcactgaagaatttcctttcagccaagaagcagtgaggtctgggaatattccaaagtcatgtctctgaatatgtgtccttgacatgcaagctttgtaaaaccccatccccgcttaggtgcgaggcatcaccttctcacaagtgtttagtttcttttaaccacaagtatcattcttgggtgataatatagtttcattctacttagggattgtttagaaaacaaagaaagagccaattaaattttttagtttttgaaatttttatttatatgtatacttagatgagtattttaagctgtcgacctttagtttgccatacgggtaggactgtatttcatgttaacaactggtggtaatgataagccttcttctagcgtattttctcttctttcctgtcactttccttttttaagtttttttttttaaagactggaattttttttggctttatcttgtcttaccgtagagatttgttcaaaactctaagccctaccacctcccctttaataagctctttaaatagttgaatcattaacaacctggtgggaggcaagtcatttaattgaaccactaggaagtgtattttcttttctttttctgccaactttttggtggcatttgtaaaagctgatataaaaggctctgagatgttattttcagttattccataggcaagcctttttacagagcatatgtctccagttggcagcttgagatatttccgagcatccggttctagctaccagtgcctcccaatgcttagtgcacagtactgtagactggccatcacccctctccttggaaaatgccactgtgctgtttgaaaaaaagcagccttttagggctagagtattttatataaacagaagagctaagttcctgaagactaagctagatagctgcagctatatgtaaattgtatatttttatgaacttttgaagcacacactcctgtttccctctgtgtagctttgtggggatttcatgtatatatgctgtctgaaagaatccagaggttggagtgccaatagaaaatgaaaacaaatgccttgtactacaggcagcctctgaaggtgaccacataactgtcttcactgtgaccaatcggagtccctgcttgcttgtgaagaaggggcttttgtaccttgttggagatgccacctcagaagttcacactgtgcaggaaaaaggttttattctctcctggcatacattagaatgtcagatgcctgcatccatgtggaccacgatgggcctctaaaaattggtgggcagggggtttgcttatgagttttctctggaaaccgattttactcctggatgtattgaatgccccttgagctttatgagatacgagtccacatggataaaatgttagagagtggagttctacagaggattccaggaagaggccatgtctgtgcagtcctagttccagacaggtgagaagctccaggaactactggctaccttgacaagctgggtaaatagttatcattctgggtaactggttgaaactctgacttttggacaagtaattcctggggttctgtctttggtagcatcaccagggatatttgggtgggacagacagaagacacacagctgcctgttctctcctgcccatcatgtttggcccactagatgaagctgtactcagcaatttagggaatgtaacccttctcagaactggccattttcaggggaagcttgggagagcaatagtatggtgagccccttagagatgagcgcctactccttcttggcgaatgctgccttcagatgcttaccaagtggtcactgcatctagtaagattatatttccagtacacttccttagggcagaaacaccatcctatcaggtttggtcagtcccttcttcatgaagggagtcatggggaattcctgaaaattttcttccttctgcagacagttggatgagtcccttagagaaggcatccagagacataactaaactgaatatcatcccatattgattttaggaattgactctaaaactctgtgcagaatcttgtgttgggattgtatcttgacattcctgttgtgttatttttcttaactggagtgtgtgctgcctttcaggtacaatttttgtgtaataaaagccagtgcattaagtttatatagactactttctatgcaagactgagatatggaatagataggaagagatatgtactgctgggtacatggacagtaagtgtgttttcagatggagtaccagcaccgaaaatgggttgagggaggatgggttgtatgtatgtttctgcccactaattttgagcagccatattatgaattaaatcgtcacagccaagtaataacccaagaatggtatgagtttcatgtgtaatagctcaaatggaataagcatgaatgctggagtggaccattatcctcaaatattctatgtcacttctcatttaaagactcttgttatgaactattagaaactttaggcaaaatcaaaagtatttgcggcaaaataaaggcctattctactcttatttaaagtgaaacactgtatacttgtttctctccaaagcgaaattaagtatttataatttcaattgcctcgataagtttccaagtcactgaaatctgctgaaggttttactgtattgttgcacaactttaagataatttttgtctcaatgtcaacttttttcactgaataaaaatttaactgggtcaagaaaacacctctttgaaaatccactgtctctgtgtgtctcgagctgttctttagagcgcaataaagatggctgacgcagtctcc

SEQ ID NO: 219 - DNA, 2878 bp, Homo sapiens
  misc_feature: Incyte ID No: 331033.1
ggctcgggttgtgagggttcctgcttcggagtcggcggtggtcgtccagaccgagtgttctttactttttgtttggttgaggtttcacgctagaaggtggctcaggatgtcttcatcacattttgccagtcgacacaggaaggatataagtactgaaatgattagaactaaaattgctcataggaaatcactgtctcagaaagaaaatagacataaggaatacgaacgaaatagacactttggtttgaaagatgtaaacattccaaccttggaaggtagaattcttgttgaattagatgagacatctcaagggcttgttccagaaaagaccaatgttaagccaagggcaatgaaaactattctaggtgatcaacgaaaacagatgctccaaaaatacaaagaagaaaagcaacttcaaaaattgaaagagcagagagagaaagctaaacgaggaatatttaaagtgggtcgttatagacctgatatgccttgttttcttttatcaaaccagaatgctgtgaaagctgagccaaaaaaggctattccatcttctgtacggattacaaggtcaaaggccaaagaccaaatggagcagactaagattgataacgagagtgatgttcgagcaatccgacctggtccaagacaaacttctgaaaagaaagtgtcagacaaagagaaaaaagttgtgcagcctgtaatgcccacgtcgttgagaatgactcgatcagctactcaagcagcaaagcaggttcccagaacagtctcatctaccacagcaagaaagccagtcacaagagctgctaatgaaaacgaaccagaaggaaaggtgccaagtaaaggaagacctgccaaaaatgtagaaacaaaacccgacaagggtatttcttgtaaagtcgatagtgaagaaaatactttgaattcacaaactaatgcaacaagtggaatgaatccagatggagtcttatcaaaaatggaaaacttacctgagataaatactgcaaaaataaaagggaagaattccttcgcacctaaggattttatgtttcagccactggatggtctgaagacctatcaagtaacacctatgactcccagaagtgccaatgcttttttgacacccagttacacctggactcctttaaaaacagaagttgatgagtctcaagcaacaaaagaaattttggcacaaaaatgtaaaacttactctaccaagacaatacagcaagattcaaataaattgccatgtcctttgggtcctctaactgtttggcatgaagaacatgttttaaataaaaatgaagctactactaaaaatttaaatggccttccaataaaagaagtcccatcacttgaaagaaatgaaggtcgaattgctcagccccaccatggtgtgccatatttcagaaatatcctccagtcagaaactgagaaattaacttcacattgcttcgagtgggacaggaaacttgaattggacattccagatgatgctaaagatcttattcgcacagcagttggtcaaacaagactccttatgaaggaaaggtttaaacagtttgaaggactggttgatgattgtgaatataaacgaggtataaaggagactacctgtacagatctggatggattttgggatatggttagttttcagatagaagatgtaatccacaaattcaacaatctgatcaaacttgaggaatctgggtggcaagtcaataataatatgaatcataatatgaacaaaaatgtctttaggaaaaaagttgtctcaggtatagcaagtaaaccaaaacaggatgatgctggaagaattgcagcgagaaatcgcctagctgccataaaaaatgcaatgagagagagaattaggcaggaagaatgtgctgaaacagcagtttctgtgataccaaaggaagttgataaaatagtgttcgatgctggatttttcagagttgaaagtcctgttaaattattctcaggactttctgtctcttctgaaggcccttctcaaagacttggaacacctaagtctgtcaacaaagctgtatctcagagtagaaatgagatgggcattccacaacaaactacatcaccagaaaatgccggtcctcagaatacgaaaagtgaacatgtgaagaagactttgtttttgagtattcctgaaagcaggagcagcatagaagatgctcagtgtcctggattaccagatttaattgaagaaaaccatgttgtaaataagacagacttgaaggtggattgtttatccagtgagagaatgagtttgcctcttcttgctggtggagtagcagatgatattaatactaacaaaaaagaaggaatttcagatgttgtggaaggaatggaactgaattcttcaattacatcacaggatgttttgatgagtagccctgaaaaaaatacagcttcacaaaatagcatcttagaagaaggggaaactaaaatttctcagtcagaactatttgataataaaagtctcactactgaatgccaccttcttgattcaccaggtctaaactgcagtaatccatttactcagctggagaggagacatcaagaacatgccagacacatttcttttggtggtaacctgattactttttcacctctacaaccaggagaattttgaatttaaaaataaatccaaacattttccttcatattatcaatgcttatatattccttagactattgaaattttggagaaaatgtatttgtgttcacttctatagcatataatgttttaatattctgtgttcatcaaagtgtattttagatatactctttctcaagggaagtggggatattttgtacattttcaacacagaataaaaaatgtactgtgaaaaaaaaaaaaaaa

SEQ ID NO: 220 - DNA, 1339 bp, Homo sapiens
  misc_feature: Incyte ID No: 1098766.1
ctttatttttcataagctaatgtaaatgaagaaaaaatgtcttctctgggctgtaggcctggctcagcgtacacaggtatacatcctaagctctctatgttctctaatctgtggtgactgaacatgtgtctcaatgcacggggcatttctacctgtgtttctgcagcacccccactgccttgagtccccagcagtgctgttatttgcctaacacctgtagccatctgccacgcagccagacgtgaaagctgagacagagaccatttaggttaaatacgacagcttatcctgctgggtggggaaagtaaaaaatatgctggttcaaggcctaaagtaaaatgatcaataatgtttgtagcattaatgaaatattttcaagaaatgtgtccaggggtagcactggctatgttgacgaggcctttggtaactcagagagctcttggccctgatggggacttgcccttacgctttctttatcaggctctgagttcacacggagcctctggcacttccctgctgtcttgggagaaaggaaactggttgccgcggcaggttgtggaatctgttgctggaaccaggctggaagcccacctggtagtgaacagggcccagtggggcaggctgggcatgttgtggtctatgggtttgtttcctggagaatgttcaggaatgtcttcccagctgctttggtgctgagctctattatctcacagcacgtccagaaggctaacccaggtggggaggatgctgacaccagctccaggtggagttggtggtcttaatttggagatgcaggggcaacctgtgaccctttgaggcaagagccctgcacccagctgtcccgtgcagccgtgggcaggggctgcacacggaggggcaggcgggccagttcagggtccgtgccaggccctcctcagtgccctgtgaaggcctcctgtcctccgtgcggctgggcaccagcaccagggagtttctatggcaaccttagtgattattaaggaacactgtcagttttatgaacatatgctcaaatgaaattctactttaggaggaaaggattggaacagcatgtcacaaggctgttaattaacagagagaccttattggatggagatcacatctgttaaatagaatacctcaactctacgttgttttcttggagataaataatagtttcaagtttttgtttgtttgttttacctaattacctgaaagcaaataccaaaggctgatgtctgtatatggggcaaagggtcagtatatttttcagtgttttttttctaccagctattttgcatttaaagtgaacattgtgtttggaataaatactcttaaaaaa

SEQ ID NO: 221 - DNA, 2824 bp, Homo sapiens
  misc_feature: Incyte ID No: 245632.3
tcgccgccgccgccgccgccgcctcagccttcgcctcagccgccgcccgctcccgcccgcgcgcgcgggatggacgatcaatccaggatgctgcagactctggccggggtgaacctggctggccactcggtgcaggggggcatggccctgccgcctcccccgcacggccacgaaggggcggacggcgacggcaggaagcaggacatcggcgacatcctccaccagatcatgaccatcaccgaccagagcttggacgaggcgcaagcaaagaaacatgccctgaactgtcacagaatgaaaccagcgctcttcagcgtcctgtgtgagatcaaagagaaaacaggtctcagcatcagaggagcccaggaggaggaccctcccgatccccagctaatgagactggacaatatgcttttggcagaaggggtttcaggtcctgagaaaggtgggggatcggcggcagcagctgcagccgcggcagcctctggaggttcttcagataactctattgaacactcagattacagagccaaattgacccagatcagacaaatctatcacacagaactggagaaatatgaacaggcatgtaatgaatttactacacatgtgatgaaccttctccgagaacagagtagaacacgtcccatttctccaaaagagattgaaagaatggtgggcatcatccatcgaaaatttagttccattcagatgcagctcaaacaaagcacttgtgaagcagttatgattttaagatcaaggttccttgatgccagacggaaaaggcgtaacttcagtaaacaggccacagaaatcttgaatgaatatttttactcacacctcagcaacccctaccccagtgaagaagccaaagaggagctggccaagaaatgcagcatcacagtgtcacaggtatccaattggtttggcaacaaacgaatcaggtacaagaagaacattggcaagtttcaggaagaagccaacctctatgctgcaaagacggccgtgacagctgcacacgcagtagcagcagctgtgcagaacaaccagaccaattcgcccaccacaccaaattccggttcttctggttcttttaacctcccaaattctggggacatgttcatgaacatgcagagtctgaatggggattcttaccaagggtcccaagtcggagccaatgtgcaatcacaggtggataccctccgtcatgttatcaatcagacgggaggctacagtgatggccttggaggaaattcactgtacagtccacataatttaaatgctaatggaggctggcaggacgcaacaactccatcttctgtgacttctcctacagaaggcccaggaagtgtgcactcggatacctctaactaatctctggccacacttttccctgagctacatgccttgataagtgcattcagagcaataggaggaaaaggaaagcgtttttgtagcccaccatctacagctttactgtaaaaccttgtcttattcgagaacttggtaaatctgttttttaaggaatcataatcatttgtatttatacttaaaaacacacaatgttaaaaaaaataaagcactttatccaattaggccaagatttaacattgttgacagtcctgtagctattttatcataatttattatcaatattttacattaatggtttcacagttgccaattacttggccttaagggtaaaaagtacaatatacactaaacctcaaccgttaaagcagatgcaaaaattcacctcacctaaattgaacttcttgcatatttccattactgacttggattgtctttctttcatatcactaatggagttggaataaagagctgtttgcctatccctgttaatgatggttgtgtttaagaatcttcctcgtcacgtttgtgttcagatctcttatgttataattagatcagagactggtagcatcgtttctctctctgaaagcaccagtgcccagagtctgctcggtaataaaattatggatccagattgttctgagagacgaagatacttgctgctgatagaggtgaaaacgagattgatccgtctggggttttacggtgtgcactgggtgctgcacagacttgtcaaggtttgctacgtcctctgggcatctgcaaaaggccctgctctctggagtgttgtatatagtgtagcaaaagagtatttatacatcccaccaatcaaaacacagctttattacctcatgcgaactcatacaaaccaatagaatttcaacatgttctgtagcttagagtgctcacttactacctctgaacaatactcacgctgtagtttgtctctttcttatctttttgcatcttgtaattaactctttgtttcccttcataaaatgtaatgtacattgtaatcttttaaaagaaaaatcagggttgcacttgcaacttttaaaaaaccgagtgtggaaacattgggtcttaattcaacacaggatcggtaaaactgttgtaaatactgagaaacattttgaatgttcttcatcttattactaatccatgcaaaaaaaaaaaaaaagcagcgactaattgtgatgcattcagatttcagtattcagtactgtatatttcaccctgtgtaatggggccccctctcctttctctctttttgtattgtatgcgattctgaaactgattgagtcatgaaaataatttgtggcggtgattctaatgtattaaaaacgtttcgtgttcctttctaactggattacaccctggattgaaaaagtcttcctcgtggtagttatatgtagtttcaaacatgaataaactttttgctttcatgatt

SEQ ID NO: 222 - DNA, 3082 bp, Homo sapiens
  misc_feature: Incyte ID No: 333461.2
gtctcgacgcgcgcgatttaaaaccagctcaggagacgccaaggaaagatgggacctcccggcccagcactgccagccacaatgaataactcttcttcagagacgcgaggacacccccacagtgcctcctctccttcagagcgtgtgttcccgatgcccctgcccaggaaggcgcctctcaatattcctggcaccccagtcctcgaagactttcctcagaatgacgatgagaaggagcggctgcagcggaggcgctcgagggtctttgatctgcagttcagcactgactcacctcgcttattggcctccccctccagcaggagtattgacatttcagctactatccccaagtttacaaacacgcagattacggaacattactccacctgtatcaaactgtccactgaaaataaaatcactaccaagaatgcttttggtttgcacttgattgattttatgtcagagattcttaaacagaaagacaccgaaccaaccaactttaaagtggctgcgggtactctggatgccagcaccaagatctatgctgtgcgcgtggatgccgtccatgccgatgtatacagagtccttggggggctgggcaaagatgcaccgtctttggaagaagtagaaggccatgttgctgatggaagtgctactgaaatgggaacaaccaaaaaggctgtaaagccaaagaagaagcacttacacagaactattgagcagaacataaacaacctcaatgtctccgaagcagatcggaagtgtgagattgatcccatgtttcagaagacagcagcctcatttgatgagtgcagcacagcaggggtgtttctgtccactctccactgccaggactacagaagtgaactgctgtttccctctgatgtccagactctctccacgggagaacctctcgagttgccagagttaggttgtgttagaaatgacagatttaaaagcgcctccttgcagcagtgtgcagaagatcgccagatctgcccttccctggccgggttccagtttacacagtgggacagtgaaacacataatgagtctgtgtcggccctggtagacaagtttaagaagaatgaccaggtatttgacatcaatgctgaagttgacgagagtgactgtggagacttccccgatgggtccctgggggatgactttgatgccaacgatgaacctgaccacaccgcagttggggatcatgaagagttcaggagctggaaggagccctgccaggttcagagctgccaggaagaaatgatttcccttggggatggagacatcaggaccatgtgcccccttctgtctatgaaacctggagaatattcttatttcagtcctcggaccatgtcgatgtgggctggcccggatcactggcgctttaggcctcgacgcaaacaagatgctccttcccaatcagaaaacaaaaagaagagtacaaaaaaagattttgaaattgactttgaagatgatattgactttgatgtatattttagaaaaacaaaggctgctactattctgaccaagtccactttggagaaccagaattggagagctaccacccttcctacagatttcaactacaatgttgacactctggtccagcttcacctcaaaccaggcaccaggttacttaagatggcccagggccatagggcagagactgagcattatgaagaaattgaagactatgattacaacaaccctaacgacacctccaacttttgccctggattacaggctgctgacagtgatgatgaagatttggatgacttatttgtgggacctgttgggaactctgacctctcaccttatccttgccatccacctaagacagcacaacagaatggtgacactccagaagcccaaggattagacatcacaacatatggggagtcaaacttggtagctgagcctcagaaggtaaataaaattgaaattcactatgccaagactgccaaaaagatggacatgaagaaactgaagcagagcatgtggagtctgctgacagcgctctccggaaaggaggcagatgcagaggcaaaccacagggaagctggaaaagaagcggccctggcagaagtggctgacgagaagatgcttagcgggctcacgaaggacctgcagaggagcctgccccctgtcatggctcagaacctctccatacctctggcttttgcctgtctcctacatttagccaatgaaaagaatctaaaactggaaggaacagaggacctctctgatgttcttgtgaggcaaggagattgagttcactatggagaagtcagcagcaggaggcccatcccttactcagttgccgggacatccccagtctcgggggaagaagatgccatgggcttatacccaggctgtagccaactaccaacgtgcctgtttgtttgttgctctttccttctctccatcatagtctgggtgccagcgccctgaagctccgtgctcaactgattaaactttactgccctatggtgaccatctaggagaggggagggcagagggggtgagggtactattctggattgagaaaacctatatccattctttatatcaatgtatagttttagtctcctaaattgatctgttattttccaaactattctcttgtagaaaattttccagtgggcacttaatggtgcccttgaagaacttcctaatccatgtacataaaatacatcatatgtacacttataaatgtatatagaatgctcaaaaataaaattcttaataatagaactggcaaaatatttgagtgtccactagatgagtatcagacctagtccttacccttagggggatgcagtcctggttgttatccaggatacacacctgtcagtataaggcagaagatgcctaagggccaagatggtttgcctcggaggagaatggaagagagagattgctgactggacattcagatgcaagactgggtcctgcttaaatcccaggattctgctggagggagctgatagtgatacttgtcccttctgtacattgcttcatgtagccttctcagcatccctaggagaaacttactattgtgactctcatgttggag

SEQ ID NO: 223 - DNA, 3394 bp, Homo sapiens
  misc_feature: Incyte ID No: 347876.6
gaattcggcacgagcgagtcgcgacgtcgtcggcaagcggccgccttccacgtaacgcgcgccggcgggggagggcgttggcgcggagccgacgggaacgtccgcgctgcggagcagggcagggaagccgggaggcgggcccggcccgagcttgtccttgtcgcgcaggtactccgagcactatgtcgtccccggcgtcgaccccgagccgccgcggcagccggcgtggaagggccacccccgcccagacgcctcggagtgaggatgccaggtcatctccctctcagagacgtagaggcgaggattccacctccacgggggagttgcagccgatgccaacctcgcctggagtggacctgcagagccctgctgcgcaggacgtgctgttttccagccctccccaaatgcattcttcagctatccctcttgactttgatgttagttcaccactgacatacggcactcccagctctcgggtagagggaaccccaagaagtggtgttaggggcacacctgtgagacagaggcctgacctgggctctgcacagaagggcctgcaagtggatctgcagtctgacggggcagcagcagaagatatagtggcaagtgagcagtctctaggccaaaaacttgtgatctggggaacagatgtaaatgtggcagcatgcaaagaaaactttcagagatttcttcagcgttttattgaccctctggctaaagaagaagaaaatgttggcatagatattactgaacctctatacatgcaacgacttggggagattaatgttattggtgagccatttttaaatgtgaactgtgaacacatcaaatcatttgacaaaaatttgtacagacaactcatctcttacccacaggaagttattccaacttttgacatggctgtcaatgaaatcttctttgaccgttaccctgactcaatcttagaacatcagattcaagtaagaccattcaacgcattgaagactaagaatatgagaaacctgaatccagaagacattgaccagctcatcaccatcagcggcatggtgatcaggacatcccagctgattcccgagatgcaggaggccttcttccagtgccaagtgtgtgcccacacgacccgggtggagatggaccgcggcgcattgcagagcccagtgtgtgcgggcgctgccacaccacccacagcatggcactcatccacaaccgctccctcttctctgacaagcagatgatcaagcttcaggagtctccggaagacatgcctgcagggcagacaccacacacagttatcctgtttgctcacaatgatctcgttgacaaggtccagcctggggacagagtgaatgttacaggcatctatcgagctgtgcctattcgagtcaatccaagagtgagtaatgtgaagtctgtctacaaaacccacattgatgtcattcattatcggaaaacggatgcaaaacgtctgcatggccttgatgaagaagcagaacagaaacttttttcagagaaacgtgtggaattgcttaaggaactttccaggaaaccagacatttatgagaggcttgcttcagccttggctccaagcatttatgaacatgaagatataaagaagggaattttgcttcagctctttggcgggacaaggaaggattttagtcacactggaaggggcaaatttcgggctgagatcaacatcttgctgtgtggcgaccctggtaccagcaagtcccagctgctgcagtacgtgtacaacctcgtccccaggggccagtacacgtctgggaagggctccagtgcagttggcctcactgcgtacgtaatgaaagaccctgagacaaggcagctggtcctgcagacaggtgctcttgtcctgagtgacaacggcatctgctgtatcgatgagttcgacaagatgaatgaaagtacaagatcggtattgcatgaagtcatggaacagcagactctgtccattgcaaaggctgggatcatctgtcagctcaatgcgcgcacctctgtcctggcagcagcaaatcccattgagtctcagtggaatcctaaaaaaacaaccattgaaaacatccagctgcctcatactttattatcaaggtttgatttgatcttcctcatgctggaccctcaggacgaagcctatgacaggcgtctggctcaccacctggtcgcactgtactaccagagcgaggagcaggcagaggaggagctcctggacatggcggtgctaaaggactacattgcctacgcgcacagcaccatcatgccgcggctaagtgaggaagccagccaggctctcatcgaggcttatgtagacatgaggaagattggcagtagccggggaatggtttctgcataccctcgacagctagagtcattaatccgcttagcagaagcccatgctaaagtaagattgtctaacaaagttgaagccattgatgtggaagaggccaaacgcctccatcgggaagctctgaagcagtctgcaactgatccccggactggcatcgtggacatatctattcttactacggggatgagtgccacctctcgtaaacggaaagaagaattagctgaagcattgaaaaagcttattttatctaagggcaaaacaccagctctaaaataccagcaactttttgaagatattcggggacaatctgacatagcaattactaaagatatgtttgaagaagcactgcgtgccctggcagatgatgatttcctgacagtgactgggaagaccgtgcgcttgctctgaagccttgtgagcaaggaaggctccctgcatgtcctgcttgctgcacgccacatgggtgtggtctgcatctcagttggccgccatcagtgtaaatagagcttaaagtcatggtttggctgcataaaaattttctaacttgggttcaatatttgtagtgaagtatctgttttcatttttttcacgttataaataaaaatactatgctggccactgcacccagcctttgttttattttttattttttgagaggtatgattctttctagagattttttctcatggctactattagatcaggaatgggtgattggagattattagattctaggttaacttctaccactttaccctaatacataaaactttttcctaaataaatgatggaaggaataatacttggttacctggcattatttttcagtaagaaaaaagctttactaaccactacatttatggaaatttgtaggggtaagtattttataggtcataaaaaacaccataatataacgaatctcattttctttaaatgtgaattaaatcctaacagtcatctttataaaatgaccataggctaaaatcttacgtgtaagtactactacaataaataatttctgaaaccttt

SEQ ID NO: 224 - DNA, 557 bp, Homo sapiens
  misc_feature: Incyte ID No: 413842.1
  unsure 459, 495-496, 503, 518-519, 538: a, t, c, g, or other
gaaccccagaacaaccagctggatcaattctcataggagccacagcgcggagactgtgaaacatggttccaaaactgttcacttcccaaatttgtctgcttcttctgttggggcttctggctgtggagggctcactccatgtcaaacctccacagtttacctgggctcaggggtttgacgtccatcagtaggaaccagctccaatgcaccaatgcaatgcgggtaattaacaattatcaacggcgatggaaaaaccgaaatacttttcttcttgcaacttttgctaatgtagttaatgtttgtggtaacccaactataacctgccctcataacagaactctcaacaattgtcatcatagtggagtccaggtgcctttaatgtactgtaacctcacaactccaagtccacagaatatttcaaactgcaggtatgcgcagacaccagcgaacatgttctanatagttgcatgttgacaacagggatcaacgacgggnncctccanagtatccagtggttnnagttcacctggatagcatnatctaagctcctgtatcag

SEQ ID NO: 225 - DNA, 3331 bp, Homo sapiens
  misc_feature: Incyte ID No: 235867.2
  unsure 2284-2423, 2441, 2444: a, t, c, g, or other
ctcgagagttgccggggaggagcggagcggtgcggaggctctgctcggatcgaggtctgcagcgcagcttcgggagcatgagtgctgcagtgactgcagggaagctggcacgggcaccggccgaccctgggaaagccggggtccccggagttgcagctcccggagctccggcggcggctccaccggcgaaagagatcccggaggtcctagtggacccacgcagccggcggcgctatgtgcggggccgctttttgggcaagggcggctttgccaagtgcttcgagatctcggacgcggacaccaaggaggtgttcgcgggcaagattgtgcctaagtctctgctgctcaagccgcaccagagggagaagatgtccatggaaatatccattcaccgcagcctcgcccaccagcacgtcgtaggattccacggctttttcgaggacaacgacttcgtgttcgtggtgttggagctctgccgccggaggtctctcctggagctgcacaagaggaggaaagccctgactgagcctgaggcccgatactacctacggcaaattgtgcttggctgccagtacctgcaccgaaaccgagttattcatcgagacctcaagctgggcaaccttttcctgaatgaagatctggaggtgaaaataggggattttggactggcaaccaaagtcgaatatgacggggagaggaagaagaccctgtgtgggactcctaattacatagctcccgaggtgctgagcaagaaagggcacagtttcgaggtggatgtgtggtccattgggtgtatcatgtataccttgttagtgggcaaaccaccttttgagacttcttgcctaaaagagacctacctccggatcaagaagaatgaatacagtattcccaagcacatcaaccccgtggccgcctccctcatccagaagatgcttcagacagatcccactgcccgcccaaccattaacgagctgcttaatgacgagttctttacttctggctatatccctgcccgtctccccatcacctgcctgaccattccaccaaggttttcgattgctcccagcagcctggaccccagcaaccggaagcccctcacagtcctcaataaaggcttggagaaccccctgcctgagcgtccccgggaaaaagaagaaccagtggttcgagagacaggtgaggtggtcgactgccacctcagtgacatgctgcagcagctgcacagtgtcaatgcctccaagccctcggagcgtgggctggtcaggcaagaggaggctgaggatcctgcctgcatccccatcttctgggtcagcaagtgggtggactattcggacaagtacggccttgggtatcagctctgtgataacagcgtgggggtgctcttcaatgactcaacacgcctcatcctctacaatgatggtgacagcctgcagtacatagagcgtgacggcactgagtcctacctcaccgtgagttcccatcccaactccttgatgaagaagatcaccctccttaaatatttccgcaattacatgagcgagcacttgctgaaggcaggtgccaacatcacgccgcgcgaaggtgatgagctcgcccggctgccctacctacggacctggttccgcacccgcagcgccatcatcctgcacctcagcaacggcagcgtgcagatcaacttcttccaggatcacaccaagctcatcttgtgcccactgatggcagccgtgacctacatcgacgagaagcgggacttccgcacataccgcctgagtctcctggaggagtacggctgctgcaaggagctggccagccggctccgctacgcccgcactatggtggacaagctgctgagctcacgctcggccagcaaccgtctcaaggcctcctaatagctgccctcccctccggactggtgccctcctcactcccacctgcatctggggcccatactggttggctcccgcggtgccatgtctgcagtgtgccccccagccccggtggctgggcagagctgcatcatccttgcaggtgggggttgctgtgtaagttatttttgtacatgttcgggtgtgggttctacagccttgtccccctccccctcaaccccaccatatgaattgtacagaatatttctattgaattcggaactgtcctttccttggctttatgcacattaaacagatgtgaatattctttttcttgtatttcctgaggggtgccagggcctgggatccagcgaacatctctgcttcatcagccccaggctgcccagcctctgccagtnnnnnnnnnnnnnnnnnnnnnnnnnnnnnnnnnnnnnnnnnnnnnnnnnnnnnnnnnnnnnnnnnnnnnnnnnnnnnnnnnnnnnnnnnnnnnnnnnnnnnnnnnnnnnnnnnnnnnnnnnnnnnnnnnnnnnnnnnnnntgtgagccactgcacccnagncctgcggcttttctgattctgaggccagccacaggctcagctcttcagtgagccagcacggagaccatctgtgtggcatccagcccacctcacctccctgtggccccagggcatggcctcctggcctctgagtctggcgggtagtagggcaggaagaggctctcagaggcgcagctcctcatggctcggtgcgtgtggaggagcagccgtgggaagcggtttgtgaagtactggacgaagccatcagggacttggccgagtgcctgtcgcacctcaactgggagctccctgtagtggtgcttcttgttcctcacagcacggagcaggtctcgcactgatgtccccttataggaccggaactttctcagatctgtctgcagcggcatggagatgtgctcgtgccagttgtcccggaccactgcgcagcctcccgcctccagtgccctcaccaggggctcctgctcggactccttctccagccagtcactgacgtcctggaagaactggagttgcttggctctgctccaaaagaaggggtgggccagcacctggggggcagaggggcgtggctgcggcagtgggctcaacatggctccaaccaggtcccgggcaaccaccttgtcgtggacctcttcctccaggtgagccagacagggagcccctgtgaggatgtttgcctggcgataaagactgtctccaaaggggtggctgccaccagaaagcacgtagtagaacacgcagcctgcagagaagatgtccacagcgctggtaggactgtctggtggcaggagctgcagaagctcgggcgccatccagccttccgtgccggggatgccggagtggaggctgaagctacagcggccagcaggcagcttcttgcagaggcc

SEQ ID NO: 226 - DNA, 2432 bp, Homo sapiens
  misc_feature: Incyte ID No: 428665
gtcacgggtggcgggcgcgggaaggggatttggattgttgcgcctctgctctgaagaaagtgctgtctggctccaactccagttctttcccctgagcagcgcctggaacctaacccttcccactctgtcaccttctcgatcccgccggcgctttagagccgcagtccagtcttggatccttcagagcctcagccactagctgcgatgcatgtgatcaagcgagatggccgccaagaacgagtcatgtttgacaaaattacatctcgaatccagaagctttgttatggactcaatatggattttgttgatcctgctcagatcaccatgaaagtaatccaaggcttgtacagtggggtcaccacagtggaactagatactttggctgctgaaacagctgcaaccttgactactaagcaccctgactatgctatcctggcagccaggatcgctgtctctaacttgcacaaagaaacaaagaaagtgttcagtgatgtgatggaagacctctataactacataaatccacataatggcaaacactctcccatggtggccaagtcaacattggatattgttctggccaataaagatcgcctgaattctgctattatctatgaccgagatttctcttacaattacttcggctttaagacgctagagcggtcttatttgttgaagatcaatggaaaagtggctgaaagaccacaacatatgttgatgagagtatctgttgggatccacaaagaagacattgatgcagcaattgaaacatataatcttctttctgagaggtggtttactcatgcttcgcccactctcttcaatgctggtaccaaccgcccacaactttctagctgttttcttctgagtatgaaagatgacagcattgaaggcatttatgacactctaaagcaatgtgcattgatttctaagtctgctggaggaattggtgttgctgtgagttgtattcgggctactggcagctacattgctgggactaatggcaattccaatggccttgtaccgatgctgagagtatataacaacacagctcgatatgtggatcaaggtgggaacaagcgtcctggggcatttgctatttacctggagccttggcatttagacatctttgaattccttgatttaaagaagaacacaggaaaggaagagcagcgtgccagagatcttttctttgctctttggattccggatctcttcatgaaacgagtggagactaatcaggactggtctttgatgtgtccaaatgagtgtcctggtctggatgaggtttggggagaggaatttgagaaactatatgcaagttatgagaaacaaggtcgtgtccgcaaagttgtaaaagctcagcagctttggtatgccatcattgagtctcagacggaaacaggcaccccgtatatgctctacaaagattcctgtaatcgaaagagcaaccagcagaacctgggaaccatcaaatgcagcaacctgtgcacagaaatagtggagtacaccagcaaagatgaggttgctgtttgtaatttggcttccctggccctgaatatgtatgtcacatcagaacacacatacgactttaagaagttggctgaagtcactaaagtcgttgtccgaaacttgaataaaattattgatataaactactatcctgtaccagaggcatgcctatcaaataaacgccatcgccccattggaattggggtacaaggtctggcagatgcttttatcctgatgagatacccttttgagagtgcagaagcccagttactgaataagcagatctttgaaactatttattatggtgctctggaagccagctgtgaccttgccaaggagcagggcccatacgaaacctatgagggctctccagttagccaaaggaattcttcagtatgatatgtggaatgttactcctacagacctatgggactggaaggttctcaaggagaagattgcaaagtatggtataagaaacagtttacttattgccccgatgcctacagcttccactgctcagatcctggggaataatgagtccattgaaccttacaccagcaacatctatactcgcagagtcttgtcaggagaatttcagattgtaaatcctcacttattgaaagatcttaccgagcggggcctatggcatgaagagatgaaaaaccagattattgcatgcaatggctctattcagagcataccagaaattcctgatgacctgaagcaactttataaaactgtgtgggaaatctctcagaaaactgttctcaagatggcagctgagagaggtgctttcattgatcaaagccaatctttgaacatccacattgcttgaggtggtaaggctttgctggaccctgttgcaggcaaaaggagtaattgatttaaagtactgttaatgatgttaatgattttttttt

SEQ ID NO: 227 - DNA, 1375 bp, Homo sapiens
  misc_feature: Incyte ID No: 002234.3
ttggccacagcagcgcgaggcgggcacggggtattgtccggctccggcggcggcggtcggtgctgcgagagcggcggcggcggcgcgggtcggcagcgggagggcgcgcggccgagcggaggcggagtcggcgccgagaacatggctggaggcaaagctggaaaggacagtgggaaggccaaggctaaggcagtatctcgctcacagagagctgggctacagtttcctgtgggccgcatccacagacacttgaagactcgcaccacaagccatggaagggtgggtgccactgctgccgtgtacagtgctgcgattctggagtacctcactgcagaggtgctggagctggcaggtaatgcttctaaggatctcaaagtaaagcgtatcactccgcgtcacttgcagcttgcaatccgtggtgatgaagagttggattctcttatcaaggctaccatagctgggggtggtgtgatccctcacatccacaaatctctgattggaaagaagggacagcagaaaactgcttagagggatgctttaaccaaccctcttcctccccgtcattgtactgtaactgggacagaagaaataatggggatatgtggaatttttaacaacagttaaatggaaaagcatagacaattactgtagacatgataaaagaaacatttgtatgttcttagactcgaagtttgataaaagtaccttttcatgtggtgacagttgtgtgttgattggctaggtttctcccgtgtgttttatacaaaaatggaattgataaaccattttttacaaaattaatttgtctcaaaactgttctgttcatgatgtattagaaatattttactcagactttaaatattttaaatctcagattggttattcagagtaaccttagaacagaaattgggaatatatctttacaatgattgataccatggtatattgactcttagatgctattgatctgtagcaccattttttacaaacgactaaggaaaaaacctgccaattaaatcatgatatgccatcaattatgagacatcccaatttgagagatgttagattatagaaaagtatgctttatgactgaaatggtagtggaattatttgaattctacaccaagcacttaccatgtgccaggccctttgcagagtgctctactgaccaagaaagttgttcctgccacattatagatgtggagcctaagggtcacagaaattgtgtgctatgccaaaaaacattgaactggtagatagaaaatgacagagctaggattcaaacctagatctggctgactccagagcctagttttacctggaattgatgttcagtttatcaaaggtttctccttttggtttaaaatcccaattt

SEQ ID NO: 228 - DNA, 3631 bp, Homo sapiens
  misc_feature: Incyte ID No: 1000139.13
cgccggccggcccgacacggctcactcgcgcccttgccgctgccaccgcaccccgccatggagcggccgtcgctgcgcgccctgctcctcggcgccgctgggctgctgctcctgctcctgcccctctcctcttcctcctcttcggacacctgcggcccctgcgagccggcctcctgcccgcccctgcccccgctgggctgcctgctgggcgagacccgcgacgcgtgcggctgctgccctatgtgcgcccgcggcgagggcgagccgtgcgggggtggcggcgccggcagggggtactgcgcgccgggcatggagtgcgtgaagagccgcaagaggcggaggggtaaagccggggcagcagccggcggtccgggtgtaagcggcgtgtgcgtgtgcaagagccgctacccggtgtgcggcagcgacggcaccacctacccgagcggctgccagctgcgcgccgccagccagagggccgagagccgcggggagaaggccatcacccaggtcagcaagggcacctgcgagcaaggtccttccatagtgacgccccccaaggacatctggaatgtcactggtgcccaggtgtacttgagctgtgaggtcatcggaatcccgacacctgtcctcatctggaacaaggtaaaaaggggtcactatggagttcaaaggacagaactcctgcctggtgaccgggacaacctggccattcagacccggggtggcccagaaaagcatgaagtaactggctgggtgctggtatctcctctaagtaaggaagatgctggagaatatgagtgccatgcatccaattcccaaggacaggcttcagcatcagcaaaaattacagtggttgatgccttacatgaaataccagtgaaaaaaggtgaaggtgccgagctataaacctccagaatattattagtctgcatggttaaaagtagtcatggataactacattacctgttcttgcctaataagtttcttttaatccaatccactaacactttagttatattcactggttttacacagagaaatacaaaataaagatcacacatcaagactatctacaaaaatttattatatatttacagaagaaaagcatgcatatcattaaacaaataaaatactttttatcacaacacagtacatatttgtcatttttaaaaagccacacaatagaaacaagacaccaagatatttaattatcttgttgactcctgtaaaatagctaaacactcatcattcgcggtgcaatactcatagacataagttcctgaaacaatagtttgcatgcgtaaggcattcgcaccaaagaaatctgggttttattgcggcagcccctgcattcatatgtatgggtcctggtgttggcaatcgccattattccacaaagattgcaaacatgaacctgatatggatctgatgcctcaaacaatctttcccttaaaaactgggctgctccatgggcaatctgacaatctcgttccatttctccaaaacgcaggccaccatcacgagatctaccctccatgggctgtctattgaggatctgaataggtcccctagcacgagagtgaatcttatcatccaccatatgcttcaaacgctggtaataagtggggccaataaatatttgtgatgtgatttttcgaccagtgaacccattgtacaggacctcatttcctctgagatgatagccataatcagataaaagattagaaatcttctgcacgttaacagcatcattaaatggagtggcatcaccaatttcacccttgttagccgataccttcccttgaaggcattcaattaagtgaccaatagtcatacgagaggggatggcatggggattgatgatgatatcaggggtgataccttcacaggtgaaaggcatatcctcttgtctatactgaataccacaagtacccttttgaccatgtcgactagcaaatttgtctccaatctgtggaatcctaacagagcgtacccttattttacaaaatttatatccttcctgattgagagttaccataacctgatccacaatgcccgtctcgctagttctgagaaaagtgctacagtctctcttggtatagcgtctattggtgctctccaattcatcttcattttcaggcaaggtgactgttttgcctataataacatcatctcctgatacacgaacccctggagctatcaaaccatcatcatccagcttgtcgtaaatggcatgcctcatgccctggcatgtttcacgtgtaggcttctcaaaaacttcttcttgatcaaatccttttttagactcctgttctttgtatgagcgatagaaaacagacctgaagaagccgcggtctacagctgaacgattcatgataacagagtcttcctgattatatccagtgtatgatgcaatggccacaattgagttgatgcctgctggcagctctctaaatcgtagatattccatagaccgtgtagtcacaagtggcttttgaggataatagagaacatgggccaatgtgtccatgcgaacatggaagttggtgatgtaaactcccatagcctgcttacccatagcagactggtatgtgtttctaggggactggttatgatcaggaaagggaataatagatgcacagacaccaaggatcattgagggatgaatctcacagtgtgtatatgtggaacaataagctacttctttctcctgtaaatcatctggagtcattgcaagcatcactgtttcttcttccagggtatcaatatactccactaccccactggccacaagatcctgccaactatagttgttatattctctctctttcaattggtcaatatgcctcttcttcaaaagtagcttttgtttttccacaatcagaagtggtctacaaatacggcctgcatctgtatagatccgaatctccctctctcgaatatctctgatcatagaaacttcagacacaatgatgtccatctgacgtctcaatttccttagggtgttcataagttgttcgggatctttatgtattccaacccagcagccattaacaaaaatcttggttgcatcagcaatagctgcaggagaaatttcttctaaattttccatactccattcttctaaaaattccagaattggagatggttgagatccaactgaaatatatgccatcaaggctaaattcttcacaagtcctacagcatggccctctggggtctcggcaggacacaccattccccacaacgtattatgcaactgtcttggttttgctagcttgccgtctctaccaataggagaatttaaacgacgcaggtgagaaagagtagacgcaaaagtcaggcggtttaacacctgagatactccagctctggcttgatgagctttcttttgatcaccccagtttccagtagctaaagagtattttaggccatcagatatgatccgtgttttaattgccaactccaagttaaaatcctttcctcgatcaataaatttctgtgcatagatccgcacttctttaagcaaattcttaaacatacctctaaataagaatgcaagcagcggcccagcaagatccaatctcttgtttccatagtgatctctgtcatctagttctcttctacccaa

SEQ ID NO: 229 - DNA, 2806 bp, Homo sapiens
  misc_feature: Incyte ID No: 998534.1
agattcgcggccgcgtcgacggtgcgcccaccggtcccgccgggcgcccgcgggacgcgccgccagggccctctccgccgggggctcggcgctcgcccacctcttccaaatttaaccattacctaaatccgaagggaaatgagcaaacctctcggattgggtgtcaaggtctcctccgggctggggctgagcaagccctcggagtgaccgtgggtgacagcggctccagggactcttggggcgcagtggggaaagtgccggaccaccatgccgcgctcatttctcgtcaaaagcaagaaggctcacagctaccaccagccgcgctccccaggaccagactattccctccgtttagagaatgtaccggcgcctagccgagcagacagcacttcaaatgcaggcggggcgaaagcggagccccgggaccgtttgtcccccgaatcgcagctgaccgaagccccagacagagcctccgcatcccccagacagctgcgaagcagcgtctgcgaacggagctcggagtttgaggacttctggaggcccccgtcaccctccgcgtctccagcctcggagaagtcaatgtgcccatcgctggacgaagcccagcccttccccctgcctttcaaaccgtactcatggagcggcctggcgggttctgacctgcggcacctggtgcagagctaccgaccgtgtggggccctggagcgtggcgctggcctgggcctcttctgtgaacccgccccggagcctggccacccggccgcgctgtacggcccgaagcgggctgccggcggcgcgggggccggggcgccagggaactgcatcgcaggggccggtgccaccgctggccctggcctagggctctacggcgacttcgggtctgcggcagccgggctgtatgaaaagcccacggcagcggcgggcttgctgtaccccgagcgtggccaccggctgcacgcaaacaaaggcgctggcgtcaaggtggagtcggagctgctgtgcacccgcctgctgctgggcggcggctcctacaagtgcatcaagtgcagcaaggtgttttccacgccgcacgggctcgaggtgcacgtgcgcaggtcccacagcggtaccagaccctttgcctgcgagatgtgcggcaagaccttcgggcacgcggtgagcctggagcagcacaaagccgtgcactcgcaggaacggagctttgactgtaagatctgtgggaagagcttcaagaggtcatccacactgtccacacacctgcttatccactcagacactcggccctacccctgtcagtactgtggcaagaggttccaccagaagtcagacatgaagaaacacactttcatccacactggtgagaagcctcacaagtgccaggtgtgcggcaaggcattcagccagagctccaacctcatcacccacagccgcaaacacacaggcttcaagcccttcggctgcgacctctgtgggaagggtttccagaggaaggtggacctccgaaggcaccgggagacgcagcatgggctcaaatgagcaccctggctggctgcaagcagcagctacacaacactacagagggcagcctccctgcttgccaccactctgctccctgcttgcctccactcccttctgactttccagaccccaggtccagtctgcagatcctaccaggttgctcctccttcgccttacctcctggagctgccagaagaaatgaggtaccctttcaaagtgcagccgagagtgagaaccaagtgactctctaggcttcggacacaaataggctcctctacacctgaagacaaaggcaaagtcaaatggggaccagaataaatcttagaccccacagtccttcccatttccagccctaatctacagacaggaatgcccttcaggtttcttccctcccccctcttgacctaccccagatatttgtgtggaagaggaggaatcaccatttacaaggtggacaaatgctaatatttttatctagaaagaagagtgagtgttaacttttatttttttccttctggggggtctgttgactcctttcttttgggtgctgcctataaatcttggaggaatcatttctcctcctcaaaaactgattcagaaactgacttggggaaggaatttaatactttgaagtcatgagatgcaccatcgaggctacccccaagaagaagcagaagagaagttggtaatgagaggggattagaggtcctcccttcagtagggctgtgaaaacctcatcactggaggtaaaagcacaagcaatgcctgtggacaagatgtcattcattcactcagcaaatgttcatggatcaccggctaccaaggtaccaggcaccatgctaggtattggggaagagagactgaagtcacaacccctgactgctcctcaaaagctaacggttgcacctccaagtggctgggtctgttcttactcttggagggaattctgagaagacagcacagaattgtaaaccttcccttttgacccttttggattttatcaggtgtaaacaaaaagctgaacagttacttcaaagatatgtgtgtatattcagttttttattgttaagctgatattttaaagatttctgagctagcaggcatgtgggaaggaaggctctgtcttcaactctttgaccctccatgtgtaccatagaggggggaaaggtggtattttcactttgatgaggttggtaaatgtttttagatcttctggtaagcattatgtttgttaatacatatttattagagtgatgttttaagttaataaagtattaagagtaaacaa

SEQ ID NO: 230 - DNA, 2844 bp, Homo sapiens
  misc_feature: Incyte ID No: 372377.6
gttgaaagctcctggcgcggcggggcggactccacccctgcccggcagcccagcgcctccggccgcacttccagctctctgcgcagcccgccgcgcagcccgccgccccagccatgggcgaagcccctgacggaccaggagaagcggcggcagatcagcatccgcggcatcgtgggcgtggagaacgtggcagagctgaagaagagtttcaaccggcacctgcacttcacgctggtcaaggaccgcaacgtggccaccacccgcgactactacttcgcgctggcgcacacggtgcgcgaccacctggtggggcgctggatccgcacgcagcagcactactacgacaagtgccccaagagggtatattacctctctctggaattttacatgggccgaacattacagaacaccatgatcaacctcggtctgcaaaatgcctgtgatgaggccatttaccagcttggattggatatagaagagttagaagaaattgaagaagatgctggacttggcaatggtggtcttgggagacttgctgcctgcttcttggattccatggcaaccctgggacttgcagcctatggatacggcattcggtatgaatatgggattttcaatcagaagatccgagatggatggcaggtagaagaagcagatgattggctcagatatggaaacccttgggagaagtcccgcccagaattcatgctgcctgtgcacttctatggaaaagtagaacacaccaacaccgggaccaagtggattgacactcaagtggtcctggctctgccatatgacacccccgtgcccggctacatgaataacactgtcaacaccatgcgcctctggtctgctcgggcaccaaatgactttaacctcagagactttaatgttggagactacattcaggctgtgctggaccgaaacctggccgagaacatctcccgggtcctctatcccaatgacaatttttttgaagggaaggagctaagattgaagcaggaatactttgtggtggctgcaaccttgcaagatatcatccgccgtttcaaagcctccaagtttggctccacccgtggtgcaggaactgtgtttgatgccttcccggatcaggtggccatccagctgaatgacactcaccctgcactcgcgatccctgagctgatgaggatttttgtggatattgaaaaactgccctggtccaaggcatgggagctcacccagaagaccttcgcctacaccaaccacacagtgctcccggaagccctggagcgctggcccgtggacctggtggagaagctgctccctcgacatttggaaatcatttatgagataaatcagaagcatttagatagaattgtggccttgtttcctaaagatgtggaccgtctgagaaggatgtctctgatagaagaggaaggaagcaaaaggatcaacatggcccatctctgcattgtcggttcccatgctgtgaatggcgtggctaaaatccactcagacatcgtgaagactaaagtattcaaggacttcagtgagctagaacctgacaagtttcagaataaaaccaatgggatcactccaaggcgctggctcctactctgcaacccaggacttgcagagctcatagcagagaaaattggagaagactatgtgaaagacctgagccagctgacgaagctccacagcttcctgggtgatgatgtcttcctccgggaactcgccaaggtgaagcaggagaataagctgaagttttctcagttcctggagacggagtacaaagtgaagatcaacccatcctccatgtttgatgtccaggtgaagaggatacatgagtacaagcgacagctcttgaactgtctgcatgtgatcacgatgtacaaccgcattaagaaagaccctaagaagttattcgtgccaaggacagttatcattggtggtaaagctgccccaggatatcacatggccaaaatgatcataaagctgatcacttcagtggcagatgtggtgaacaatgaccctatggttggaagcaagttgaaagtcatcttcttggagaactacagagtatctcttgctgaaaaagtcattccagccacagatctgtcagagcagatttccactgcaggcaccgaagcctcggggacaggcaatatgaagttcatgctaaatggggccctaactatcgggaccatggatggggccaatgtggaaatggcagaagaagctggggaagagaacctgttcatctttggcatgaggatagatgatgtggctgctttggacaagaaagggtacgaggcaaaagaatactatgaggcacttccagagctgaagctggtcattgatcaaattgacaatggctttttttctcccaagcagcctgacctcttcaaagatatcatcaacatgctattttatcatgacaggtttaaagtctttgcagactacgaagcctatgtcaagtgtcaagataaagtgagtcagctgtacatgaatccaaaggcctggaacacaatggtactcaaaaacatagctgcctcggggaaattctccagtgaccgaacaattaaagaatatgcccaaaacatctggaacgtggaaccttcagatctaaagatttctctatccaatgaatctaacaaagtcaatggaaattgaactctacaatgtctctagaaaacatagcttcttactgaacttgaacatttttacaacattcactggtttttgttttgttagctaataatctataatagttgagtatctctgggaatggggagggaaattatatgtaatagagcttaaaaataaagtgtcaatttccaagggaaaaaaaaaaaaaaa

SEQ ID NO: 231 - DNA, 2554 bp, Homo sapiens
  misc_feature: Incyte ID No: 1101412.4
gctcgaggagaaagtagctccagcagcacccgagagggtcaggagaaaagcggaggaagctgggtaggccctgaggggcctcggtaagccatcatgaccacccggcaagccacgaaggatcccctcctccggggtgtatctcctacccctagcaagattccggtacgctctcagaaacgcacgcctttccccactgttacatcgtgcgccgtggaccaggagaaccaagatccaaggagatgggtgcagaaaccaccgctcaatattcaacgccccctcgttgattcagcaggccccaggccgaaagccaggcaccaggcagagacatcacaaagattggtggggatcagtcagcctcggaaccccttggaagagctcaggcctagccctaggggtcaaaatgtggggcctgggccccctgcccagacagaggctccagggaccatagagtttgtggctgaccctgcagccctggccaccatcctgtcaggtgagggtgtgaagagctgtcacctggggcgccagcctagtctggctaaaagagtactggttcgaggaagtcagggaggcaccacccagagggtccagggtgttcgggcctctgcatatttggcccccagaacccccacccaccgactggaccctgccagggcttcctgcttctctaggctggagggaccaggacctcgaggccggacattgtgcccccagaggctacaggctctgatttcaccttcaggaccttcctttcacccttccactcgccccagtttccaggagctaagaagggagacagctggcagcagccggacttcagtgagccaggcctcaggattgctcctggagaccccagtccagcctgctttctctcttcctaaaggagaacgcgaggttgtcactcactcagatgaaggaggtgtggcctctcttggtctggcccagcgagtaccattaagagaaaaccgagaaatgtcacataccagggacagccatgactcccacctgatgccctcccctgcccctgtggcccagcccttgcctggccatgtggtgccatgtccatcaccctttggacgggctcagcgtgtaccctccccaggccctccaactctgacctcatattcagtgttgcggcgtctcaccgttcaacctaaaacccggttcacacccatgccatcaacccccagagttcagcaggcccagtggctgcgtggtgtctcccctcagtcctgctctgaagatcctgccctgccctgggagcaggttgccgtccggttgtttgaccaggagagttgtataaggtcactggagggttctgggaaaccaccggtggccactccttctggaccccactctaacagaacccccagcctccaggaggtgaagattcaacgcatcggtatcctgcaacagctgttgagacaggaagtagaggggctggtagggggccagtgtgtccctcttaatggaggctcttctctggatatggttgaacttcagcccctgctgactgagatttctagaactctgaatgccacagagcataactctgggacttcccaccttcctggactgttaaaacactcagggctgccaaagccctgtcttccagaggagtgcggggaaccacagccctgccctccggcagagcctgggcccccagaggccttctgtaggagtgagcctgagataccagagccctccctccaggaacagcttgaagtaccagagccctaccctccagcagaacccaggcccctagagtcctgctgtaggagtgagcctgagataccggagtcctctcgccaggaacagcttgaggtacctgagccctgccctccagcagaacccaggcccctagagtcctactgtaggattgagcctgagataccggagtcctctccgccaggaacagcttgaggtacctgagccctgccctccagcagaacccgggccccttcagcccagcacccaggggcagtctggacccccagggccctgccctagggtagagctgggggcatcagagccctgcaccctggaacatagaagtctagagtccagtctaccaccctgctgcagtcagtgggctccagcaaccaccagcctgatcttctcttcccaacacccgctttgtgccagcccccctatctgctcactccagtctttgagacccccagcaggccaggcaggcctcagcaatctggcccctcgaaccctagccctgagggagcgcctcaaatcgtgtttaaccgccatccactgcttccacgaggctcgtctggacgatgagtgtgccttttacaccagccgagcccctccctcaggccccacccgggtctgcaccaaccctgtggctacattactcgaatggcaggatgccctgtgtttcattccagttggttctgctgccccccagggctctccatgatgagacaaccactcctgccctgccgtacttcttccttttagcccttatttattgtcggtctgcccatgggactgggagccgcccacttttgtcctcaataaagtttctaaagtaaaaaaaaaa

SEQ ID NO: 232 - DNA, 616 bp, Homo sapiens
  misc_feature: Incyte ID No: 261567.5
agtctccggcgagttgttgcctgggctggacgtggttttgtctgctgcgcccgctcttcgcgctctcgtttcattttctgcagcgcgccagccaggatggcccacaagcagatctactactcggacaagtacttcgacgaacactacgagtaccggcatgttatgttacccagagaactttccaaacaagtacctaaaactcatctgatgtctgaagaggagtggaggagacttggtgtccaacagagtctaggctgggttcattacatgattcatgagccagaaccacatattcttctctttagacgacctcttccaaaagatcaacaaaaatgaagtttatctggggatcgtcaaatctttttcaaatttaatgtatatgtgtatataaggtagtattcagtgaatacttgagaaatgtacaaatctttcatccatacctgtgcatgagctgtattcttcacagcaacagagctcagttaaatgcaactgcaagtaggttactgtaagatgtttaagataaaagttcttccagtcagtttttctcttaagtgcctgtttgagtttactgaaacagtttacttttgttcaataaagtttgtatgttgcatttaaa

SEQ ID NO: 233 - DNA, 2122 bp, Homo sapiens
  misc_feature: Incyte ID No: 232713.2
cgggggcggggcacctctgtgcagggttcccagtcaccgcgacgctcctcgggaagccatagggcgcctcccagcccgtctccccgctccagtttagaacctaattcccaattcccggaccgggcccagccctgggctcttactgtccgcttttgctgggacctgttccacaaatgggcgtcttctgccttgggccgtgggggttgggccggaagctgcggacgcctgggaaggggccgctgcagctcttgagccgcctctgcggggaccacttgcaggccatcccagccaagaaggccccggctgggcaggaggagcctgggacgccgccctcctcgccgctgagtgccgagcagttggaccggatccagaggaacaaggccgcggccctgctcagactcgcggcccgcaacgtgcccgtgggctttggagagagctggaagaagcacctcagcggggagttcgggaaaccgtattttatcaagctaatgggatttgttgcagaagaaagaaagcattacactgtttatccacccccacaccaagtcttcacctggacccagatgtgtgacataaaagatgtgaaggttgtcatcctgggacaggatccatatcatggacctaatcaagctcacgggctctgctttagtgttcaaaggcctgttccgcctccgcccagtttggagaacatttataaagagttgtctacagacatagaggattttgttcatcctggccatggagatttatctgggtgggccaagcaaggtgttctccttctcaacgctgtcctcacggttcgtgcccatcaagccaactctcataaggagcgaggctgggagcagttcactgatgcagttgtgtcctggctaaatcagaactcgaatggccttgttttcttgctctggggctcttatgctcagaagaagggcagtgccattgataggaagcggcaccatgtactacagacggctcatccctcccctttgtcagtgtatagagggttctttggatgtagacacttttcaaagaccaatgagctgctgcagaagtctggcaagaagcccattgactggaaggagctgtgatcatcagctgaggggtggcctttgagaagctgctgttaacgtatttgccagttacgaagttccactgaaaattttcctattaattcttaagtactctgcataagggggaaaagcttccagaaagcagccatgaaccaggctgtccaggaatggcagctgtatccaaccacaaacaacaaaggctaccctttgaccaaatgtctttctctgcaacatggcttcggcctaaaatatgcagaagacagatgaggtcaaatactcagttggctctctttatctcccttgcctttatggtgaaacaggggagatgtgcacctttcaggcacagccctagtttggcgcctgctgctccttggttttgcctggttagactttcagtgacagatgttggggtgtttttgcttagaaaggtccccttgtctcagccttgcagggcaggcatgccagtctctgccagttccactgcccccttgatctttgaaggagtcctcaggcccctcgcagcataaggatgttttgcaactttccagaatctggcccagaaattagggctcaatttcctgattgtagtagaggttaagattgctgtgagctttatcagataagagaccgagagaagtaagctgggtcttgttattccttgggtgttggtggaataagcagtggaatttgaacaaggaagaggagaaaagggaattttgtctttatggggtggggtgattttctcctagggttatgtccagttggggtttttaaggcagcacagactgccaagtactgttttttttaaccgactgaaatcactttgggatattttttcctgcaacactggaaagttttagttttttaagaagtactcatgcagatatatatatatatatttttcccagtcctttttttaagagacggtctttattgggtctgcacctccatccttgatcttgttagcaatgctgtttttgctgttagtcgggttagagttggctctacgcgaggtttgttaataaaagtttgttaaaagttaaaaaaaaaaa

SEQ ID NO: 234 - DNA, 2673 bp, Homo sapiens
  misc_feature: Incyte ID No: 214335.13
cgggaggcgcctcgtgcggaggcggcccgaggcctagtgacaggcgcgcggcgggaccccggaagcccacctgtcagagataccggtcagccgggcgggcgccgccggggtctggggtggacgccgcgagcctgcacgttgcgccgggaccccggggctgtgcccagaaaaatcatttttcttctctgggaaggtgaacatttgtagcattgatttcccggatctggtaacatggcaaaagatgccggtctaattgaagccaacggagaactcaaggtcttcatagaccagaaccttagtcccgggaaaggcgtggtgtccctcgtggccgttcacccctccaccgtcaacccgctcgggaagcagctcttgccaaaaacctttggacagtccaatgtcaacattgcccagcaagtggtaattggtacgcctcagagaccggcagcgtcaaacaccctggtggtaggaagcccacacacccccagcactcactttgcctctcagaaccagccttccgactcctcaccttggtctgccgggaagcgcaacaggaaaggagagaagaatggcaagggcctacggcatttctccatgaaggtctgcgagaaggtgcagaggaaagggaccacttcctacaacgaagtggccagacgagctggttgcggagttcagtgctgccgacaaccacatcttaccaaacgagtcagcttatgaccagaaaaacataagacggcgcgtctacgatgccttaaacgtgctaatggccatgaacatcatctccaaggagaagaaggagatcaagtggattggtctgcccaccaactcggctcaggaatgtcagaacttagaggtggaaagacagaggagacttgaaagaataaaacagaaacagtctcaacttcaagaacttattctacagcaaattgccttcaagaacctggtgcagagaaaccggcatgcggagcagcaggccagccggccaccgccacccaactcagtcatccacctgcccttcatcatcgtcaacaccagcaagaagacggtcatcgactgcagcatctccaatgacaaatttgagtatctgtttaattttgacaacacatttgaaatccacgatgacatagaagtgctgaagcggatgggcatggcttgcgggctggagtcggggagctgctctgccgaagaccttaaaatggccagaagtctggtccccaaggctctggagccatacgtgacagaaatggctcagggaactgttggaggcgtgttcatcacgacggcaggttccacgtctaacggcacaaggttctctgccagtgacctgaccaacggtgcagatgggatgctggccacaagctccaatgggtctcagtacagcggctccagggtggagactccggtgtcctacgtcggggaggacgacgaggaggacgatgacttcaacgagaatgacgaggacgactgacgtcctccccacttcagattcggcttcaggaaaacgtttagcgaaaagaaactttttttttaatgtgggttttctgtttccttttggcctactcccaagaagatattggtaagctattgaatttagatatgcacctctgataagcaaggattgtttcccgtaggattaggacgtgctgtggatgtgtgttttgataccagtgtgctgatgcagagcgtttatttacttgttaggattttgtgttttcatttgctatttttctttaagtgcagagttcatttttgcccctgaaaagtttttgctgagtttgctgaagaaattgtatttcaaccacatccatgaaaataaaacacctcctgttgtggatggtgagcccctgatgccgcttatttgccgtgagtttggacggcacccctgctggcggatagcaagactctgtggagtttgttcagtggtacggtgtccaagcaaacagcagaatgcaactttctaaacagccccaagcaaacagcagaattcaactttttaaacaataaacaccatcaaccttattgactttattgtcccttaaattatattgactgttgtgattccatcaagtttgtacactcttttctctccctgttttgcagcaacaaattgcgaagtgcttttgtttgtttgttttcgtttggttaaagcttattgccatgctggtgcggctatggagactgtctggaaggcttggaatggtttattgcttatggtaaaatttgcctgatttcttacaggcagcgtttggaaaccttttattatatagttgtttacatacttataagtctatcatttaaagacatgtactgaaacaaatgtatttgtttcataagcatcttcctgtaatctattataaaattgaaattaaatatagagaatgttttaacaattttttaactcaaaatttgtcaatcatttttaatagttctttttttataaaaagaaaaaggaatttaaggacaggcagtagtctcttttaaaatttattcacaaaacccattaactgcacagttgctattagctgcctgttctaaaacgatagtctttttattgaaacacaaataaacttttctgtaatattttatggtatataaagagactttaattgtttgacttgtttaacttggcactgttagtttttattaataaaacgcgcatgggcattttaaaaaaaa

SEQ ID NO: 235 - DNA, 4409 bp, Homo sapiens
  misc_feature: Incyte ID No: 331022.33
tttcgactcgcgctccggctgctgtcacttggctctctggctggagcttgaggacgcaaggagggtttgtcactggcagactcgagactgtaggcactgccatggcccctgtgctcagtaaggactcggcggacatcgagagtatcctggctttaaatcctcgaacacaaactcatgcaactctgtgttccacttcggccaagaaattagacaagaaacattggaaaagaaatcctgataagaactgctttaattgtgagaagctggagaataattttgatgacatcaagcacacgactcttggtgagcgaggagctctccgagaagcaatgagatgcctgaaatgtgcagatgccccgtgtcagaagagctgtccaactaatcttgatattaaatcattcatcacaagtattgcaaacaagaactattatggagctgctaagatgatattttctgacaacccacttggtctgacttgtggaatggtatgtccaacctctgatctatgtgtaggtggatgcaatttatatgccactgaagagggacccattaatattggtggattgcagcaatttgctactgaggtattcaaagcaatgagtatcccacagatcagaaatccttcgctgcctcccccagaaaaaatgtctgaagcctattctgcaaagattgctctttttggtgctgggcctgcaagtataagttgtgcttcctttttggctcgattggggtactctgacatcactatatttgaaaaacaagaatatgttggtggtttaagtacttctgaaattcctcagttccggctgccgtatgatgtagtgaattttgagattgagctaatgaaggaccttggtgtaaagataatttgcggtaaaagcctttcagtgaatgaaatgactcttagcactttgaaagaaaaaggctacaaagctgctttcattggaataggtttgccagaacccaataaagatgccatcttccaaggcctgacgcaggaccaggggttttatacatccaaagactttttgccacttgtagccaaaggcagtaaagcaggaatgtgcgcctgtcactctccattgccatcgatacggggagtcgtgattgtacttggagctggagacactgcctttgactgtgcaacatctgctctacgttgtggagctcgccgtgtgttcatcgtcttcagaaaaggctttgttaatataagagctgtccctgaggagatggaacttgctaaggaagaaaagtgtgaatttctgccattcctgtccccacggaaggttatagtaaaaggtgggagaattgttgctatgcagtttgttcggacagagcaagatgaaactggaaaatggaatgaagatgaagatcagatggtccatctgaaagccgatgtggtcatcagtgcctttggttcagttctgagtgatcctaaagtaaaagaagccttgagccctataaaatttaacagatggggtctcccagaagtagatccagaaactatgcaaactagtgaagcatgggtatttgcaggtggtgatgtcgttggtttggctaacactacagtggaatcggtgaatgatggaaagcaagcttcttggtacattcacaaatacgtacagtcacaatatggagcttccgtttctgccaagcctgaactacccctcttttacactcctattgatctggtggacattagtgtagaaatggccggattgaagtttataaatccttttggtcttgctagcgcaactccagccaccagcacatcaatgattcgaagagcttttgaagctggatggggttttgccctcaccaaaactttctctcttgataaggacattgtgacaaatgtttcccccagaatcatccggggaaccacctctggccccatgtatggccctggacaaagctcctttctgaatattgagctcatcagtgagaaaacggctgcatattggtgtcaaagtgtcactgaactaaaggctgactttccagacaacattgtgattgctagcattatgtgcagttacaataaaaatgactggacggaacttgccaagaagtctgaggattctggagcagatgccctggagttaaatttatcatgtccacatggcatgggagaaagaggaatgggcctggcctgtgggcaggatccagagctggtgcggaacatctgccgctgggttaggcaagctgttcagattcctttttttgccaagctgaccccaaatgtcactgatattgtgagcatcgcaagagctgcaaaggaaggtggtgccaatggcgttacagccaccaacactgtctcaggtctgatgggattaaaatctgatggcacaccttggccagcagtggggattgcaaagcgaactacatatggaggagtgtctgggacagcaatcagacctattgctttgagagctgtgacctccattgctcgtgctctgcctggatttcccattttggctactggtggaattgactctgctgaaagtggtcttcagtttctccatagtggtgcttccgtcctccaggtatgcagtgccattcagaatcaggatttcactgtgatcgaagactactgcactggcctcaaagccctgctttatctgaaaagcattgaagaactacaagactgggatggacagagtccagctactgtgagtcaccagaaagggaaaccagttccacgtatagctgaactcatggacaagaaactgccaagttttggaccttatctggaacagcgcaagaaaatcatagcagaaaacaagattagactgaaagaacaaaatgtagctttttcaccacttaagagaaactgttttatccccaaaaggcctattcctaccatcaaggatgtaataggaaaagcactgcagtaccttggaacatttggtgaattgagcaacgtagagcaagttgtggctatgattgatgaagaaatgtgtatcaactgtggtaaatgctacatgacctgtaatgattctggctaccaggctatacagtttgatccagaaacccacctgcccaccataaccgacacttgtacaggctgtactctgtgtctcagtgtttgccctattgtcgactgcatcaaaatggtttccaggacaacaccttatgaaccaaagagaggcgtacccttatctgtgaatccggtgtgttaaggtgatttgtgaaacagttgctgtgaactttcatgtcacctacatatgctgatcttttaaaatcatgatccttgtgttcagctctttccaaattaaaacaaatatacattttctaaataaaaatatgtaatttcaaaatacatttgtaagtgtaaaaaatgtctcatgtcaatgaccattcaattagtggtcataaaatagaataattcttttctgaggatagtagttaaataactgtgtggcagttaattggatgttcactgccagttgtcttatgtgaaaaattaacttttttgtggcaattagtgtgacagtttccaaattgccctatgctgtgctccatatttgatttctaattgtaagtgaaattaagcattttgaaacaaagtactctttaacatacaagaaaatgtatccaaggaaacattttatcattaaaaattacctttaattttaatgctgtttctaagaaaatgtagttagctccataaagtacaaatgaagaaagtcaaaaaattatttgctatggcaggataagaaagcctaaaattgagtttgtagaactttattaagtaaaatccccttcgctgaaattgcttatttttggtgttggatagaggatagggagaatatttactaactaaataccattcactactcatgcgtgagatgggtgtacaaactcatcctcttttaatggcatttctctttaaactatgttcctaacaaaatgagatgataggatagatcctggttaccactcttttactgtgcacatacgggctctgactggttttaatagtcaccttcatgattatagcaactaatgtttgaacaaagctcaaagtatgcaatgcttcattattcaagaatgaaaaatataatgttgataatatatattaagtgtgccaaatcagtttgactactctctgttttagtgtttatgtttaaaagaaatatattttttgttattattagataatatttttgtatttctctattttcataatcagtaaatagtgtcatataaactcatttatctcctcttcatggcatcttcaatatgaatctataagtagtaaatcagaaagtaacaatctatggcttatttctatgacaaattcaagagctagaaaaataaaatgtttcattatgcacttttagaaatgcatatttgccacaaaacctgtattactgaataatatcaaataaaatatcataaagcatttt

SEQ ID NO: 236 - DNA, 4130 bp, Homo sapiens
  misc_feature: Incyte ID No: 332259.3
  unsure 3511-3801, 4094, 4112, 4124: a, t, c, g, or other
cgggtagcgcgcctgggagggagaaagaagtcgggggccgtggcgcgcagcccgcggggcctgaagggatgttcgaggacaagccccacgctgagggggcggcggtggtcgccgcagccggggaggcgctacaggccctgtgccaggagctgaacctggacgaggggagcgcggccgaagccctggacgactttactgccatccgaggcaactacagcctagagggagaagttacacactggttggcatgttcattatatgttgcatgccgcaaaagcattattcccacggttggaaagggtatcatggaaggcaactgtgtttcacttaccagaatactacgttcagctaaattaagtttaatacaattttttagtaaaatgaagaaatggatggacatgtcaaatctaccacaagaatttcgtgaacgtatagaaaggctagagagaaattttgaggtgtctactgtaatattcaaaaaatatgagccaatttttttagatatatttcaaaatccatatgaagaaccaccaaagttaccacgaagccggaagcagaggaggattccttgcagtgttaaggatctgtttaatttctgttggacactttttgtttatactaagggtaattttcggatgattggggatgacttagtaaactcttatcatttacttctatgctgcttggatctgatttttgccaatgcgattatgtgcccaaatagacaagacttgctaaatccatcatttaaaggtttaccatctgattttcatactgctgactttacggcttctgaagagccaccctgcatcattgctgtactgtgtgaactgcatgatggacttctcgtagaagcaaaaggaataaaggagcactactttaagccatatatttcaaaactctttgacaggaagatattaaaaggagaatgcctcctggacctttcaagttttactgataatagcaaagcagtgaataaggagtatgaagagtatgttctaactgttggtgattttgatgagaggatctttttgggagcagacgcagaagaggaaattggaacacctcgaaagttcactcgtgacaccccattagggaaactgacagcacaggctaatgtggagtataaccttcaacagcactttgaaaaaaaaaggtcatttgcaccttctaccccactgaccggacggagatatttacgagaaaaagaagcagtcattactcctgttgcatcagccacccaaagtgtgagccggttacagagtattgtggctggtctgaaaaatgcaccaagtgaccaacttataaatatttttgaatcttgtgtgcgtaatcctgttgaaaacattatgaaaatactaaaaggaataggagagactttctgtcaacactatactcaatcaacagatgaacagccaggatctcacatagactttgctgtaaacagactaaagctggcagaaattttgtattataaaatactagagactgtaatggttcaggaaacacgaagacttcatggaatggacatgtcagttcttttagagcaagatatatttcatcgttccttgatggcttgttgtttggaaattgtgctctttgcctatagctcacctcgtacttttccttggattattgaagttctcaacttgcaaccattttacttttataaggttattgaggtggtgatccgctcagaagaggggctctcaagggacatggtgaaacacctaaacagcattgaagaacagattttggagagtttagcatggagtcacgattctgcactgtgggaggctctccaggtttctgcaaacaaagttcctacctgtgaagaagttatattcccaaataactttgaaacaggaaatggaggaaatgtgcagggacatcttcccctgatgccaatgtctcctctaatgcacccaagagtcaaggaagttcgaactgacagtgggagtcttcgaagagatatgcaaccattgtctccaatttctgtccatgaacgctacagttctcctaccgcagggagtgctaagagaagactctttggagaggaccccccaaaggaaatgcttatggacaagatcataacagaaggaacaaaattgaaaatcgctccttcttcaagcattactgctgaaaatgtatcaattttacctggtcaaactcttctaacaatggccacagccccagtaacaggaacaacaggacataaagttacaattccattacatggtgtcgcaaatgatgctggagagatcacactgatacctctttccatgaatacaaatcaggagtccaaagtcaagagtcctgtatcacttactgctcattcattaattggtgcttctccaaaacagaccaatctgactaaagcacaagaggtacattcaactggaataaacaggccaaagagaactgggtccttagcactattttacagaaaggtctatcatttggcaagtgtacgcttacgtgatctatgtctaaaactggatgtttcaaatgagttacgaaggaagatatggacgtgttttgaattcactttagttcactgtcctgatctaatgaaagacaggcatttggatcagctcctcctttgtgccttttatatcatggcaaaggtaacaaaagaagaaagaacttttcaagaaattatgaaaagttataggaatcagccccaagctaatagtcacgtatatagaagtgttctgctgaaaagtattccaagagaagttgtggcatataataaaaatataaatgatgactttgaaatgatagattgtgacttagaagatgctacaaaaacacctgactgttccagtggaccagtgaaagaggaaagaggtgatcttataaaattttacaatacaatatatgtaggaagagtgaagtcatttgcactgaaatacgacttggcgaatcaggaccatatgatggatgctccaccactctctccttttccacatattaaacaacagccaggctcaccacgccgcatttcccagcagcactccatttatatttccccgcacaagaatgggtcaggccttacaccaagaagcgctctgctgtacaagttcaatggcagcccttctaagagtttgaaagatatcaacaacatgataaggcaaggtgagcagagaaccaagaagcgagtaatagccatcgatagtgatgcagaatcccctgccaaacgcgtctgtcaagaaaatgatgacgttttactgaaacgactacaggatgttgtcagtgaaagagcaaatcattaatgttgttcttgtttctatgataaaagcactttcagattgttctgcagaaagttggagctctgtccttcaaaccttttagccctatagatgataaatatcactgggttataagaaaaaattgcacaaaaattatgtgctttttaaaatatttatccaaaatgtagttgacagagatgtattttgagttggattggaaaggaatattttaagtgccttttaaaaatactaatagtccnnnnnnnnnnnnnnnnnnnnnnnnnnnnnnnnnnnnnnnnnnnnnnnnnnnnnnnnnnnnnnnnnnnnnnnnnnnnnnnnnnnnnnnnnnnnnnnnnnnnnnnnnnnnnnnnnnnnnnnnnnnnnnnnnnnnnnnnnnnnnnnnnnnnnnnnnnnnnnnnnnnnnnnnnnnnnnnnnnnnnnnnnnnnnnnnnnnnnnnnnnnnnnnnnnnnnnnnnnnnnnnnnnnnnnnnnnnnnnnnnnnnnnnnnnnnnnnnnnnnnnnnnnnnnnnnnnnnnnnnnnnnnnnnnnntctatatatcaatagggaattttttttaatgtttgctccttgagttttcaagatgaaataaggagaaaccccataactttttagctctcttttaaaaataaatgtctccttctgtgttctgtaatatgaggataaataatctacttttgatagcatgctttgagatatttgtattcttaatttaatattgaaggaaggggttggttcccatagtacctggccagagggttatataccatcctgtctctggcccactgtggtaattccacatccaggtaccaccgccattcagngttgtctcaccccttctngtgccttttctntccttg

SEQ ID NO: 237 - DNA, 1425 bp, Homo sapiens
  misc_feature: Incyte ID No: 253570.8
ctgctgccgggcagaagaaaagcagggcaggctggctcccaggcctcagggtggggatggcagtgggaatgaagcacctgtaactgggcccttcctgccctaatgttcagggggccctacccctcgtgagcttgtcttattaagaaccctcaaaaggcctaagttaaccagcaggtccaaaggtcccaaggaacaaggtcagagacgccagggaaaagaggtgagctgtgcaggactagcactgggaaaactggcaatttgtgttgtcaagtgtgtgcctgtgcaagtgctccaactgctgctttgggtgaacttcaggccttgcctcttccctatcaccatcgtctccatcaacaccctctttcttttccagcctctcctggtgccttaggaatcagacgccaataaaccacagagcccagcatgtccaccttcgcttttattgagtagttagtgttctcaagctggctcacacccatgcggtcagctggggcctagggtggctctttgcaaagctgaggggcaagctaaggaagccaggcaggtcaggggccctttcggccttctcaagcctccacctgagttctcgtcaatgccagtctccctggtatgattggggacattatcagagaaacatctaatagcgcacatctgggcacccacactctgcttcagttgcatccatcctcccaccccaaattcaactcctgacccaatacaaaagacttttttaaccaggatttcttcttgcaggaaagctgacttggaaacacggggaggtggcagggaggggcaaaaaggactctggcaagcagatccacttgtctgggtccctgcagtgaagaacccaagatccaggtacctcagcctggaagaaaccgtgcactgcaggtcttcccttctatcaaaactaaaagcaaggaacagaagtcaattgaaaccccaggtcatcctacccaccttctggcagtctctggataatgatctaaggaaataagcttacatttataattagaggataatttggagaatttatactatttacacggaccaccctgcaaagatcagggaaggctggatttcttcctccttgatagtctgaactggaagcaaaggagaaaacccttctccaaacaggagtttctcctctttccctggtcctgcagaagaaagaggagctatcccctcctcagctagcagcacctgaaagggaaacagagataaggtgaaccaacggtcaccagacaggacgcacaaaaatatcacatacgggttctgatcctctttgtgtcgttttgaagtcttaaaatctattaaatatgagaatacgatgtatgttgaagttggtagttcaattctggcggtaaaagatgcgggtatgtagtatgtagtggcataattataatagcattcatccgagaggag

SEQ ID NO: 238 - DNA, 1825 bp, Homo sapiens
  misc_feature: Incyte ID No: 995529.5
ggagcggccgccgcggtaataataagccgggatctaccatacccattgactaactatggaagattataccaaaatagagaaaattggagaaggtacctatggagttgtgtataagggtagacacaaaactacaggtcaagtggtagccatgaaaaaaatcagactagaaagtgaagaggaaggggttcctagtactgcaattcgggaaatttctctattaaaggaacttcgtcatccaaatatagtcagtcttcaggatgtgcttatgcaggattccaggttatatctcatctttgagtttctttccatggatctgaagaaatacttggattctatccctcctggtcagtacatggattcttcacttgttaagagttatttataccaaatcctacaggggattgtgttttgtcactctagaagagttcttcacagagacttaaaacctcaaaatctcttgattgatgacaaaggaacaattaaactggctgattttggccttgccagagcttttggaatacctatcagagtatatacacatgaggtagtaacactctggtacagatctccagaagtattgctggggtcagctcgttactcaactccagttgacatttggagtataggcaccatatttgctgaactagcaactaagaaaccacttttccatggggattcagaaattgatcaactcttcaggattttcagagctttgggcactcccaataatgaagtgtggccagaagtggaatctttacaggactataagaatacatttcccaaatggaaaccaggaagcctagcatcccatgtcaaaaacttggatgaaaatggcttgggatttgctctcgaaaatgttaatctatgatccagccaaacgaatttctggcaaaatggcactgaatcatccatattttaatgatttggacaatcagattaagaagatgtagctttctgacaaaaagtttccatatgttatgtcaacagatagttgtgtttttattgttaactcttgtctatttttgtcttatatatatttctttgttatcaaacttcagctgtacttcgtcttctaatttcaaaaatataacttaaaaatgtaaatattctatatgaatttaaatataattctgtaaatgtgtgtaggtctcactgtaacaactatttgttactataataaaactataatattgatgtcaggaatcaggaaaaaatttgagttggcttaaatcatctcagtccttatggcagttttattttcctgtagttggaactactaaaatttaggaaaatgctaagttcaagtttcgtaatgctttgaagtatttttatgctctgaatgtttaaatgttctcatcagtttcttgccatgttgttaactatacaacctggctaaagatgaatatttttctactggtattttaatttttgacctaaatgtttaagcattcggaatgagaaaactatacagatttgagaaatgatgctaaatttataggagttttcagtaacttaaaaagctaacatgagagcatgccaaaatttgctaagtcttacaaagatcaagggctgtccgcaacagggaagaacagttttgaaaatttatgaactatcttatttttaggtaggttttgaaagctttttgtctaagtgaattcttatgccttggtcagagtaataactgaaggaggtgcttatcttggctttcgagtctgagtttaaaactacacattttgacatagtgtttattagcagccatctaaaaaggctctaatgtatatttaactaaaattactagctttgggaataaactgtttaacaaata

SEQ ID NO: 239 - DNA, 3285 bp, Homo sapiens
  misc_feature: Incyte ID No: 474435.16
  unsure 816-1128: a, t, c, g, or other
tggaagcggtctgcctagccctcgcgggggcaaggcggcgaccgaggcgcgtgggtctgggaaggcgcgcggatttggcccctcttctcacatcagcgggtccaggcccaaccgacagactatgggggctccggcaaccaggcgctgcgtggagtggctgctgggcctctacttcctcagccacatccccatcaccctgttcatggacctgcaggcggtgctgccgcgcgagctctacccagtcgagtttagaaacctgctgaagtggtatgctaaggagttcaaagacccactgctacaggagcccccagcctggtttaagtcctttctgttttgcgagcttgtgtttcagctgcctttctttcccattgcaacgtatgccttcctcaaaggaagctgcaagtggattcgaactcctgcaatcatctactctgttcacaccatgacaaccttaattccgatactctccacatttctgtttgaggatttctccaaagccagtggtttcaagggacaaagacctgagactttgcatgaacggttaacccttgtgtctgtctatgccccctacttactcatcccattcatacttttaattttcatgttgcggagcccctactacaagtatgaagagaaaagaaaaaaaaaatgaaggaaacaaccactggcccagggtagagatgcctacagggtggttgcttgttggatacaatacaaggaacactgctcagaacccacgtcttcagcagcatttgaaacactggcagcaatgcacaagagcaagatggtgtcaggaaccatgtcaaaccctcaccnnnnnnnnnnnnnnnnnnnnnnnnnnnnnnnnnnnnnnnnnnnnnnnnnnnnnnnnnnnnnnnnnnnnnnnnnnnnnnnnnnnnnnnnnnnnnnnnnnnnnnnnnnnnnnnnnnnnnnnnnnnnnnnnnnnnnnnnnnnnnnnnnnnnnnnnnnnnnnnnnnnnnnnnnnnnnnnnnnnnnnnnnnnnnnnnnnnnnnnnnnnnnnnnnnnnnnnnnnnnnnnnnnnnnnnnnnnnnnnnnnnnnnnnnnnnnnnnnnnnnnnnnnnnnnnnnnnnnnnnnnnnnnnnnnnnnnnnnnnnnnnnnnnnnnnnncaaaccttcaccttctaagggcactgggatgaacagaccgatcggcttgagggtgggcaaaggggtgtgggctaggttataaggaagtggtaccaaataactgtgtgcctgagttccaccgcaagattactaaaagcaggaccagaccagaaactgctaaagaacatggcctgtttgacatgttcatgagtcacctgacccacagcatatatgcttatgactaaaccctccactcctgattctcaagagtgtatcacctgtcagcaaaatgaatagtgggatattttgggccattttaaatgtgaaattttgcctctttaatgttaattcaaaactatatcaatgttttcttgttcccacctctaacccaaggaaaaaagagaaaacatactatgcaaaggaagtttaaacttaagttttccttaagggtcagcccaacaatgactttcagtcaaatggattaaactggaaaatgtttttgtttctgttgtaaacagatcatcctaggcgaaagttttttttgtttgtttgcttttaaattagtttatttctaaatcttagtcttccacatttctagaggccacctgacacaagtccctgtatctgaagtctagcatctcaaggctgatctggaagtgtgctagtatgctccctagtggataacttaatcttttaatacagttccgtcattcccatcttgttttcagaagagaaggtggctacagccaggcataacatatccactgtgtgcatagagggtctcttcacgttgatgcttggcattccatcagctttctctaagtctttgctcaagttcaaccttaaaatgatgttagacaacaggtcccagtcagttccctctattttcacccattttgctcacaagccatattggcccgattagtggtactgtctgactcacgtgtgtgatccaaataaaggtagctgctgaccactgcctggtttgttttgtggactaggggatagagaatccagggttctctcatgaggagttaaacatatttcaagagcaacaggaaaaaaggtacatcaagccatttgaaaacaaaaatttattgcttctccttccaaagctttgtgaatttacaaaaaaaaggatgaaagtttacaaactgcttagttccaactaagcataagaggtgagaacgtacactgcagggccaccagcagcagctgtgcactgatgttaaaactggctcccccagacttgtagtgctgtcttcagggggctgcattccttacacgccacctcttgtgacataggtcattggtcaagccgctggaatgctacagaggtttttttggttttgagaggcttttttttgttttgccttcctactataaaagcgaaattttcagttcatttctgaaaaataaattggtcaataaattcattttgttctgcttctactttacacaaagcttcatattcaacccgatacctttctagctgcattttcttttctgctattagggcttgaagttgctgctgttgagcttctctctgctttgctatagatttgagcaagttccgagcaccgatggccttcatcttttcattttctgcttcttttgcaagttgatcaacaagctcaattaaaccaccaactattttctgaaactggccaattttgtccacaaagtctttgcactcttccttcagctctatggtctgctgggtaacctctgggtccaacaccctcagcttgttcagttcatcaaagtgtagccctgcttcacccaggatgtccttggccatggctgtttcccatccaggttccctagaggagttctgctctgaaggagtgacagtggcagtcaggaggaggtgtgtcataggagcaagggtcaggaaagaataaagtccgcttgcttgtcacaggcatcgttcattcaacacacatttcttgagtgcctactacatgccaacactgctagatgctgggggtacaaagatgaatgcaacacggtgcccgccctgaagagcacatagttcagctgccggccccgcggcggcagcgcgctgcagcccaggctgatgtagacaggcagcttctcctgggtcagcgacagccggtacccagccagcctgccacggccgctgccacggatacagagcctgtttacctatgacgt

SEQ ID NO: 240 - DNA, 12319 bp, Homo sapiens
  misc_feature: Incyte ID No: 994861.1
  unsure 4425-4450, 11332-11370, 12298: a, t, c, g, or other
gctgccccgagcctttctggggaagaactccaggcgtgcggacgcaacagccgagaacattaggtgttgtggacaggagctgggaccaagatcttcggccagccccgcatcctcccgcatcttccagcaccgtcccgcaccctccgcatccttccccgggccaccacgcttcctatgtgacccgcctgggcaacgccgaacccagtcgcgcagcgctgcagtgaattttccccccaaactgcaataagccgccttccaaggccaagatgttcataaatataaagagcatcttatggatgtgttcaaccttaatagtaacccatgcgctacataaagtcaaagtgggaaaaagcccaccggtgaggggctccctctctggaaaagtcagcctaccttgtcatttttcaacgatgcctactttgccacccagttacaacaccagtgaatttctccgcatcaaatggtctaagattgaagtggacaaaaatggaaaagatttgaaagagactactgtccttgtggcccaaaatggaaatatcaagattggtcaggactacaaagggagagtgtctgtgcccacacatcccgaggctgtgggcgatgcctccctcactgtggtcaagctgctggcaagtgatgcgggtctttaccgctgtgacgtcatgtacgggattgaagacacacaagacacggtgtcactgactgtggatggggttgtgtttcactacagggcggcaaccagcaggtacacactgaattttgaggctgctcagaaggcttgtttggacgttggggcagtcatagcaactccagagcagctctttgctgcctatgaagatggatttgagcagtgtgacgcaggctggctggctgatcagactgtcagatatcccatccgggctcccagagtaggctgttatggagataagatgggaaaggcaggagtcaggacttatggattccgttctccccaggaaacttacgatgtgtattgttatgtggatcatctggatggtgatgtgttccacctcactgtccccagtaaattcaccttcgaggaggctgcaaaagagtgtgaaaaccaggatgccaggctggcaacagtgggggaactccaggcggcatggaggaacggctttgaccagtgcgattacgggtggctgtcggatgccagcgtgcgccaccctgtgactgtggccagggcccagtgtggaggtggtctacttggggtgagaaccctgtatcgttttgagaaccagacaggcttccctccccctgatagcagatttgatgcctactgctttaaacctaaagaggctacaaccatcgatttgagtatcctcgcagaaactgcatcacccagtttatccaaagaaccacaaatggtttctgatagaactacaccaatcatccctttagttgatgaattacctgtcattccaacagagttccctcccgtgggaaatattgtcagttttgaacagaaagccacagtccaacctcaggctatcacagatagtttagccaccaaattacccacacctactggcagtaccaagaagccctgggatatggatgactactcaccttctgcttcaggacctcttggaaagctagacatatcagaaattaaggaagaagtgctccagagtacaactggcgtctctcattatgctacggattcatgggatggtgtcgtggaagataaacaaacacaagaatcggttacacagattgaacaaatagaagtgggtcctttggtaacatctatggaaatcttaaagcacattccttccaaggaattccctgtaactgaaacaccattggtaactgcaagaatgatcctggaatccaaaactgaaaagaaaatggtaagcactgtttctgaattggtaaccacaggtcactatggattcaccttgggagaagaggatgatgaagacagaacacttacagttggatctgatgagagcaccttgatctttgaccaaattcctgaagtcattacggtgtcaaagacttcagaagacaccatccacactcatttagaagacttggagtcagtctcagcatccacaactgtttcccctttaattatgcctgataataatggatcatccatggatgactgggaagagagacaaactagtggtaggataacggaagagtttcttggcaaatatctgtctactacaccttttccatcacagcatcgtacagaaatagaattgtttccttattctggtgataaaatattagtagagggaatttccacagttatttatccttctctacaaacagaaatgacacatagaagagaaagaacagaaacactaataccagagatgagaacagatacttatacagatgaaatacaagaagagatcactaaaagtccatttatgggaaaaacagaagaagaagtcttctctgggatgaaactctctacatctctctcagagccaattcatgttacagagtcttctgtggaaatgaccaagtcttttgatttcccaacattgataacaaagttaagtgcagagccaacagaagtaagagatatggaggaagactttacagcaactccaggtactacaaaatatgatgaaaatattacaacagtgcttttggcccatggtactttaagtgttgaagcagccactgtatcaaaatggtcatgggatgaagataatacaacatccaagcctttagagtctacagaaccttcagcctcttcaaaattgccccctgccttactcacaactgtggggatgaatggaaaggataaagacatcccaagtttcactgaagatggagcagatgaatttactcttattccagatagtactcaaaagcagttagaggaggttactgatgaagacatagcagcccatggaaaattcacaattagatttcagccaactacatcaactggtattgcagaaaagtcaactttgagagattctacaactgaagaaaaagttccacctatcacaagcactgaaggccaagtttatgcaaccatggaaggaagtgctttgggtgaagtagaagatgtggacctctctaagccagtatctactgttccccaatttgcacacacttcagaggtggaaggattagcatttgttagttatagtagcacccaagagcctactacttatgtagactcttcccataccattcctctttctgtaattcccaagacagactggggagtgttagtaccttctgttccatcagaagatgaagttctaggtgaaccctctcaagacatacttgtcattgatcagactcgccttgaagcgactatttctccagaaactatgagaacaacaaaaatcacagagggaacaactcaggaagaattcccttggaaagaacagactgcagagaaaccagttcctgctctcagttctacagcttggactcccaaggaggcagtaacaccactggatgaacaagagggcgatggatcagcatatacagtctctgaagatgaattgttgacaggttctgagagggtcccagttttagaaacaactccagttggaaaaattgatcacagtgtgtcttatccaccaggtgctgtaactgagcacaaagtgaaaacagatgaagtggtaacactaacaccacgcattgggccaaaagtatctttaagtccagggcctgaacaaaaatatgaaacagaaggtagtagtacaacaggatttacatcatctttgagtccttttagtacccacattacccagcttatggaagaaaccactactgagaaaacatccctagaggatattgatttaggctcaggattatttgaaaagcccaaagccacagaactcatagaattttcaacaatcaaagtcacagttccaagtgatattaccactgccttcagttcagtagacagacttcacacaacttcagcattcaagccatcttccgcgatcactaagaaaccacctctcatcgacagggaacctggtgaagaaacaaccagtgacatggtaatcattggagaatcaacatctcatgttcctcccactacccttgaagatattgtagccaaggaaacagaaaccgatattgatagagagtatttcacgacttcaagtcctcctgctacacagccaacaagaccacccactgtggaagacaaagaggcctttggacctcaggcgctttctacgccacagcccccagcaagcacaaaatttcaccctgacattaatgtttatattattgaggtcagagaaaataagacaggtcgaatgagtgatttgagtgtaattggtcatccaatagattcagaatctaaagaagatgaaccttgtagtgaagaaacagatccagtgcatgatctaatggctgaaattttacctgaattccctgacataattgaaatagacctataccacagtnnnnnnnnnnnnnnnnnnnnnnnnnngtgtgcaaatgctactgatgtgacaaccaccccatctgtgcagtacataaatgggaagcatctcgttaccactgtgcccaaggacccagaagctgcagaagctaggcgtggccagtttgaaagtgttgcaccttctcagaatttctcggacagctctgaaagtgatactcatccatttgtaatagccaaaacggaattgtctactgctgtgcaacctaatgaatctacagaaacaactgagtctcttgaagttacatggaagcctgagacttaccctgaaacatcagaacatttttcaggtggtgagcctgatgttttccccacagtcccattccatgaggaatttgaaagtggaacagccaaaaaaggggcagaatcagtcacagagagagatactgaagttggtcatcaggcacatgaacatactgaacctgtatctctgtttcctgaagagtcttcaggagagattgccattgaccaagaatctcagaaaatagcctttgcaagggctacagaagtaacatttggtgaagaggtagaaaaaagtacttctgtcacatacactcccactatagttccaagttctgcatcagcatatgtttcagaggaagaagcagttaccctaataggaaatccttggccagatgacctgttgtctaccaaagaaagctgggtagaagcaactcctagacaagttgtagagctctcagggagttcttcgattccaattacagaaggctctggagaagcagaagaagatgaagatacaatgttcaccatggtaactgatttatcacagagaaatactactgatacactcattactttagacactagcaggataatcacagaaagcttttttgaggttcctgcaaccaccatttatccagtttctgaacaaccttctgcaaaagtggtgcctaccaagtttgtaagtgaaacagacacttctgagtggatttccagtaccactgttgaggaaaagaaaaggaaggaggaggagggaactacaggtacggcttctacatttgaggtatattcatctacacagagatcggatcaattaattttaccctttgaattagaaagtccaaatgtagctacatctagtgattcaggtaccaggaaaagttttatgtccttgacaacaccaacacagtctgaaagggaaatgacagattctactcctgtctttacagaaacaaatacattagaaaatttgggggcacagaccactgagcacagcagtatccatcaacctggggttcaggaagggctgaccactctcccacatggtcctgcctctgtctttatggagcagggctctggagaagctgctgccgacccagaaaccaccactgtttcttcattttcattaaacgtagagtatgcaattcaagccgaaaaggaagtagctggcactttgtctccgcatgtggaaactacattctccactgagccaacaggactggttttgagtacagtaatggacagagtagttgctgaaaatataacccaaacatccagggaaatagtgatttcagagcgattaggagaaccaaattatggggcagaaataaggggcttttccacaggttttcctttggaggaagatttcagtggtgactttagagaatactcaacagtgtctcatcccatagcaaaagaagaaacggtaatgatggaaggctctggagatgcagcatttagggacacccagacttcaccatctacagtacctacttcagttcacatcagtcacatatctgactcagaaggacccagtagcaccatggtcagcacttcagccttcccctgggaagagtttacatcctcagctgagggctcaggtgagcaactggtcacagtcagcagctctgttgttccagtgcttcccagtgctgtgcaaaagttttctggtacagcttcctccattatcgacgaaggattgggagaagtgggtactgtcaatgaaattgatagaagatccaccattttaccaacagcagaagtggaaggtacgaaagctccagtagagaaggaggaagtaaaggtcagtggcacagtttcaacaaactttccccaaactatagagccagccaaattatggtctaggcaagaagtcaaccctgtaagacaagaaattgaaagtgaaacaacatcagaggaacaaattcaagaagaaaagtcatttgaatcccctcaaaactctcctgcaacagaacaaacaatctttgattcacagacatttactgaaactgaactcaaaaccacagattattctgtactaacaacaaagaaaacttacagtgatgataaagaaatgaaggaggaagacacttctttagttaacatgtctactccagatccagatgcaaatggcttggaatcttacacaactctccctgaagctactgaaaagtcacattttttcttagctactgcattagtaactgaatctataccagctgaacatgtagtcacagattcaccaatcaaaaaggaagaaagtacaaaacattttccgaaaggcatgagaccaacaattcaagagtcagatactgagctcttattctctggactgggatcaggagaagaagttttacctactctaccaacagagtcagtgaattttactgaagtggaacaaatcaataacacattatatccccacacttctcaagtggaaagtacctcaagtgacaaaattgaagactttaacagaatggaaaatgtggcaaaagaagttggaccactcgtatctcaaacagacatctttgaaggtagtgggtcagtaaccagcacaacattaatagaaattttaagtgacactggagcagaaggacccacggtggcacctctccctttctccacggacatcggacatcctcaaaatcagactgtcaggtgggcagaagaaatccagactagtagaccacaaaccataactgaacaagactctaacaagaattcttcaacagcagaaattaacgaaacaacaacctcatctactgattttctggctagagcttatggttttgaaatggccaaagaatttgttacatcagcaccaaaaccatctgacttgtattatgaaccttctggagaaggatctggagaagtggatattgttgattcatttcacacttctgcaactactcaggcaaccagacaagaaagcagcaccacatttgtttctgatgggtccctgggaaaacatcctgaggtgccaagcgctaaagctgttactgctgatggattcccaacagtttcagtgatgctgcctcttcattcagagcagaacaaaagctcccctgatccaactagcacactgtcaaatacagtgtcatatgagaggtccacagacggtagtttccaagaccgtttcagggaattcgaggattccaccttaaaacctaacagaaaaaaacccactgaaaatattatcatagacctggacaaagaggacaaggatttaatattgacaattacagagagtaccatccttgaaattctacctgagctgacatcggataaaaatactatcatagatattgatcatactaaacctgtgtatgaagacattcttggaatgcaaacagatatagatacagaggtaccatcagaaccacatgacagtaatgatgaaagtaatgatgacagcactcaagttcaagagatctatgaggcagctgtcaacctttctttaactgaggaaacatttgagggctctgctgatgttctggctagctacactcaggcaacacatgatgaatcaatgacttatgaagatagaagccaactagatcacatgggctttcacttcacaactgggatccctgctcctagcacagaaacagaattagacgttttacttcccacggcaacatccctgccaattcctcgtaagtctgccacagttattccagagattgaaggaataaaagctgaagcaaaagccctggatgacatgtttgaatcaagcactttgtctgatggtcaagctattgcagaccaaagtgaaataataccaacattgggccaatttgaaaggactcaggaggagtatgaagacaaaaaacatgctggtccttcttttcagccagaattctcttcaggagctgaggaggcattagtagaccatactccctatctaagtattgctactacccaccttatggatcagagtgtaacagaggtgcctgatgtgatggaaggatccaatcccccatattacactgatacaacattagcagtttcaacatttgcgaagttgtcttctcagacaccatcatctcccctcactatctactcaggcagtgaagcctctggacacacagagatcccccagcccagtgctctgccaggaatagacgtcggctcatctgtaatgtccccacaggattcttttaaggaaattcatgtaaatattgaagcgactttcaaaccatcaagtgaggaataccttcacataactgagcctccctctttatctcctgacacaaaattagaaccttcagaagatgatggtaaacctgagttattagaagaaatgggaagcttctcccacagaacttattgctgtggaaggaactgagattctccaagatttccaaaacaaaaccgatggtcaagtttctggagaagcaatcaagatgtttcccaccattaaaacacctgatgctggaactgttattacaactgccgatgaaattgaattagaaggtgctacacagtggccacactctacttctgcttctgccacctatggggtcgaggcaggtgtggtgccttggctaagtccacagacttctgagaggcccacgctttcttcttctccagaaataaaccctgaaactcaagcagctttaatcagagggcaggattccacgatagcagcatcagaacagcaagtggcagcgagaattcttgattccaatgatcaggcaacagtaaaccctgtggaatttaatactgaggttgcaacaccaccattttcccttctggagacttctaatgaaacagatttcctgattggcattaatgaagagtcagtggaaggcacggcaatctatttaccaggacctgatcgctgcaaaatgaacccgtgccttaacggaggcacctgttatcctactgaaacttcctacgtatgcacctgtgtgccaggatacagcggagaccagtgtgaacttgattttgatgaatgtcactctaatccctgtcgtaatggagccacttgtgttgatggttttaacacattcaggtgcctctgccttccaagttatgttggtgcactttgtgagcaagataccgagacatgtgactatggctggcacaaattccaagggcagtgctacaaatactttgcccatcgacgcacatgggatgcagctgaacgggaatgccgtctgcagggtgcccatctcacaagcatcctgtctcacgaagaacaaatgtttgttaatcgtgtgggccatgattatcagtggataggcctcaatgacaagatgtttgagcatgacttccgttggactgatggcagcacactgcaatacgagaattggagacccaaccagccagacagcttcttttctgctggagaagactgtgttgtaatcatttggcatgagaatggccagtggaatgatgttccctggcaattaccatctcacctatacgtgcaagaaaggaacagttgcttgcggccagccccctgttgtagaaaatgccaagacctttggaaagatgaaacctcgttatgaaatcaactccctgattagataccactgcaaagatggtttcattcaacgtcaccttccaactatccggtgcttaggaaatggaagatgggctatacctaaaattacctgcatgaacccatctgcataccaaaggacttattctatgaaatactttaaaaattcctcatcagcaaaggacaattcaataaatacatccaaacatgatcatcgttggagccggaggtggcaggagtcgaggcgctgatccctaaaatggcgaacatgtgttttcatcatttcagccaaagtcctaacttcctgtgcctttcctatcacctcgagaagtaattatcagttggtttggatttttggaccaccgttcagtcattttgggttgccgtgctcccaaaacattttaaatgaaagtattggcattcaaaaagacagcagacaaaatgaaagaaaatgagagcagaaagtaagcatttccagcctatctaatttctttagttttctatttgcctccagtgcagtccatttcctaatgtataccagcctactgtactatttaaaatgctcaatttcagcaccgatggccatgtaaataagatgatttaatgttgattttaatcctgtatataaaataaaaagtcacaatgagtttgggcatatttaatgatgattatggagccttagaggtctttaatcattggttcggctgcttttatgtagtttaggctggaaatggtttcacttgctctttgactgtcagcaagactgaagatggcttttcctggacagctagaaaacacaaaatcttgtaggtcattgcacctatctcagccataggtgcagtttgcttctacatgatgctaaaggctgcgaatgggatcctgatggaactaaggactccaatgtcgaactcttctttgctgcattcctttttcttcacttacaagaaaggcctgaatggaggacttttctgtaaccaggaacattttttaggggtcaaagtgctaataattaactcaaccaggtctactttttaatggctttcataacactaactcataaggttaccgatcaatgcatttcatacggatatagacctagggctctggagggtgggggattgttnnnnnnnnnnnnnnnnnnnnnnnnnnnnnnnnnnnnnnnttttgtatatataaccattttaatcttttataaagttttgaatgttcatgtatgaatgctgcagctgtgaagcatacataaataaatgaagtaagccatactgatttaatttattggatgttattttccctaagacctgaaaatgaacatagtatgctagttatttttcagtgttagccttttactttcctcacacaatttggaatcatataatataggtactttgtccctgattaaataatgtgacggatagaatgcatcaagtgtttattatgaaaagagtggaaaagtatatagcttttagcaaaaggtgtttgcccattctaagaaatgagcgaatatatagaaatagtgtgggcatttcttcctgttaggtggagtgtatgtgttgacatttctccccatctcttcccactctgttttctccccattatttgaataaagtgactgctgaagatgactttgaatccttatccacttaatttaatgtttaaagaaaaacctgtaatggaaagtaagactccttccctaatttcagtttagagcaacttgaagaagagtagacaaaaaataaaatgcacatagaaaaagagaaaaagggcacaaagggattggcccaatattgattcttttttataaaacctcctttggcttagaaggaatgactctagctacaataatacacagtatgtttaagcaggttcccttggttgttgcattaaatgtaatccacctttaggtattttagagcacagaacaacactgtgttgatctagtaggtttctatttttcctttctctttacaatgcacataatactttcctgtatttatatcataacgtgtatagtgtaaaatgtgaatgactttttttgtgaatgaaaatctaaaatctttgtaactttttatatctgcttttgtttcaccaangaaacctaaaatccttctttt

SEQ ID NO: 241 - DNA, 833 bp, Homo sapiens
  misc_feature: Incyte ID No: g545708
aaaccagcctcatgtgacaaagcgcaggacccctcactgccccaactgcttgctgttctctctttcttgggctctaaggacccaggagtctgggtgcacagcctccttctctctgagattcaagagtctgatcagcagcctcttcctcctccaggacccagaagccctgagcttatccccatggagctctgccggtccctggccctgctggggggctccctgggcctgatgttctgcctgattgctttgagcaccgatttctggtttgaggctgtgggtcccacccactcagctcactcgggcctctggccaacagggcatggggacatcatatcaggctacatccacgtgacgcagaccttcagcattatggctgttctgtgggccctggtgtccgtgagcttcctggtcctgtcctgcttcccctcactgttccccccaggccacggcccgcttgtctcaaccaccgcagcctttgctgcagccatctccatggtggtggccatggcggtgtacaccagcgagcggtgggaccagcctccacacccccagatccagaccttcttctcctggtccttctacctgggctgggtctcagctatcctcttgctctgtacaggtgccctgagcctgggtgctcactgtggcggtccccgtcctggctatgaaaccttgtgagcagaaggcaagagcggcaagatgagttttgagcgttgtattccaaaggcctcatctggagcctcgggaaagtctggtcctacatctgcccgcccttccagcccttccccagcccctcctcttgtttcttcattcattcaacaaaatttggctgg

SEQ ID NO: 242 - DNA, 4411 bp, Homo sapiens
  misc_feature: Incyte ID No: 347965.2
  unsure 3369: a, t, c, g, or other
acggagacggaccacagcaagcagaggctgggggggggaaagacgaggaaagaggaggaaaacaaaagctgctacttatggaagatacaaaggagtctaacgtgaagacattttgctccaagaatatcctagccatccttggcttctcctctatcatagctgtgatagctttgcttgctgtggggttgacccagaacaaagcattgccagaaaacgttaagtatgggattgtgctggatgcgggttcttctcacacaagtttatacatctataagtggccagcagaaaaggagaatgacacaggcgtggtgcatcaagtagaagaatgcagggttaaaggtcctggaatctcaaaatttgttcagaaagtaaatgaaataggcatttacctgactgattgcatggaaagagctagggaagtgattccaaggtcccagcaccaagagacacccgtttacctgggagccacggcaggcatgcggttgctcaggatggaaagtgaagagttggcagacagggttctggatgtggtggagaggagcctcagcaactacccctttgacttccagggtgccaggatcattactggccaagaggaaggtgcctatggctggattactatcaactatctgctgggcaaattcagtcagaaaacaaggtggttcagcatagtcccatatgaaaccaataatcaggaaacctttggagctttggaccttgggggagcctctacacaagtcacttttgtaccccaaaaccagactatcgagtccccagataatgctctgcaatttcgcctctatggcaaggactacaatgtctacacacatagcttcttgtgctatgggaaggatcaggcactctggcagaaactggccaaggacattcaggttgcaagtaatgaaattctcagggacccatgctttcatcctggatataagaaggtagtgaacgtaagtgacctttacaagaccccctgcaccaagagatttgagatgactcttccattccagcagtttgaaatccagggtattggaaactatcaacaatgccatcaaagcatcctggagctcttcaacaccagttactgcccttactcccagtgtgccttcaatgggattttcttgccaccactccagggggattttggggcattttcagctttttactttgtgatgaagtttttaaacttgacatcagagaaagtctctcaggaaaaggtgactgagatgatgaaaaagttctgtgctcagccttgggaggagataaaaacatcttacgctggagtaaaggagaagtacctgagtgaatactgcttttctggtacctacattctctccctccttctgcaaggctatcatttcacagctgattcctgggagcacatccatttcattggcaagatccagggcagcgacgccggctggactttgggctacatgctgaacctgaccaacatgatcccagctgagcaaccattgtccacacctctctcccactccacctatgtcttcctcatggttctattctccctggtccttttcacagtggccatcataggcttgcttatctttcacaagccttcatatttctggaaagatatggtatagcaaaagcagctgaaatatgctggctggagtgaggaaaaaaatcgtccagggagcattttcctccatcgcagtgttcaaggccatccttccctgtctgccagggccagtcttgacgagtgtgaagcttccttggcttttactgaagcctttcttttggaggtattcaatatcctttgcctcaaggacttcggcagatactgtctctttcatgagtttttcccagctacacctttctcctttgtactttgtgcttgtataggttttaaagacctgacacctttcataatctttgctttataaaagaacaatattgactttgtctagaagaactgagagtcttgagtcctgtgataggaggctgagctggctgaaagaagaatctcaggaactggttcagttgtactctttaagaacccctttctctctcctgtttgccatccattaagaaagccatatgatgcctttggagaaggcagacacacattccattcccagcctgctctgtgggtaggagaattttctacagtaggcaaatatgtgctaaagccaaagagttttataaggaaatatatgtgctcatgcagtcaatacagttctcaatcccacccaaagcaggtatgtcaataaatcacatattcctaggtgatacccaaatgctacagagtggaacactcagacctgagatttgcaaaaagcagatgtaaatatatgcattcaaacatcagggcttactatgaggtaggtggtatatacatgtcacaaataaaaatacagttacaactcagggtcacaaaaaatgcatcttccaatgcatatttttattatggtaaaatatacataaatataattcaccattttaacatttaattcatattaaatacgtacaaatcagtgacatttagtacattcacagtgttgtgccaccatcaccactatttagttccagaacatttgcatcatcaatacattgtctagagacaagactatcctgggtaggcagaaaccatagatcttttgtgtttacagctatggaaaccaactgtaccataaagatagttcactgagttttaaagccaagccacatcttatttttccaaggtttaatttagtgagagggcagcattagtgtggagtggcatgcttttgccctatcgtggaatttacacatcagaatgtgcaggatccaagtctgaaagtgttgccacccgtcacacaacatgggctttgtttgcttattccatgaagcagcagctatagaccttaccatggaaacatgaagagaccctgcacccctttccttaaggattgctgcaagagttacctgttgagcaggattgactggtgatgtttcattctgaccttgtcccaagctctccatctctagatctggggactgactgttgagctgatggggaaagaaaagctctcacacaaaccggaagccaaatgtcccctatctcttgaatgatcaagtcacttttgacaacatccaggtgaatataaaaacttaataaagctgtggaaaggaactcttaatcttcttttctgctacttaggttaaattcactagatcttgattaggaatcaaaattcgaattgggacatgttcaaattctttcttgtggtagttgcctatactgtcatcgctgctgttggttgagcatttgtggtgtaccacgctgtgtgctcaagggtattacattcatcttctcatttaatcctcacaacaatctgaagaaggtaggtattacaattcccncttcatagaaacagaaactgaggttcagagaggttaagcatttgcccaaatggctgagccaaagcctaccatgtacctaacctttattttctttcccgaacataccaggctgtctcctcataacttccaagcatgcacttaaaactccacatgaatacaaggttcatgggacttggtattcatagaaagggaggcagaaagctggtctgttcctgataggcttgtaatttaatatcattctgttcatgtgctttggatggaagcacatctggcatatgatgctaatcagtggttcccatacccctggcttcctaattttaatgtttgctcacagcatagtagattgacatcaaatagtggccgatgatgatgaaaataaaggtcaaataagttgagccaataacagccgcttttttccttctgtctgcgtatacaaagcactgtcatgcacacaatctattctgaccctcacaacaacccataagggtgtaaatagtatttccattttacaaatgaggatcacacaaactactacatggcagagcagatactccaactcatgtcttctggttgaagcctattgctttttcttttctaaacactttccctcagcaagttggaattagacttcacaagtctccttcagagaacacaaatcttttcttattccattcctgtttggttgcctacgtccaatctccccctccccagagatgccaaaaaaaaaatcctttaaggtatttgggagccaaactcaacttgttaaaatctcaaattatggagacaatcagcagacacaacctaaccccaattattttggcaggaaggttggtttagaggcagatccagcaatctgctttgggccactctgggtggggtaggtgaaataagattggtcactgttaactaattttaatattggattggccattggttatcactgattaccattctcccctggattttcacccaggactcaaaacttggttctgctaaccctgttcctttatgaggaaccttttaaagattcctttataaggtg

SEQ ID NO: 243 - DNA, 2001 bp, Homo sapiens
  misc_feature: Incyte ID No: 202361.1
gtctcagggaagtagcaggcgccggttgagagaactacggccctgtcggaaggtaacctccggtgcaaacgaccatcggcggcaggcgagcggtacgcttggcgtccgggccttcctgggcccgtctgaggaaacttgctgctcgaggccaggctgcctaggacctgtccctttttttctatactggctcccacatccgggttttttctccgggacggcccttcggatgcttgggccaatgggaatcgccatttagggtgctccgcccaccgggtcgcgtagagcatcctggaagtcgtagtaaatctctcgagagttctctccgcacgcggggctggagaagcgggtcctacgcacgctttgttgtcgcgctttgcctccgtccttccccctactcccgccttacctgacttccttttcggaggaagatccttgagcagccgacgttgggacaaaggatttggagaaacccagggctaaagtcacgtttttcctcctttaagacttacctcaacacttcactccatggcagttcccgagacccgccctaaccacactatttatatcaacaacctcaatgagaagatcaagaaggatgagctaaaaaagtccctgtacgccatcttctcccagtttggccagatcctggatatcctggtatcacggagcctgaagatgaggggccaggcctttgtcatcttcaaggaggtcagcagcgccaccaacgccctggcgctccatgcagggtttccctttctatgacaaacctatgcgtatccagtatgccaagaccgactcagatatcattgccaagatgaaaggcaccttcgtggagcgggaccgcaagcgggagaagaggaagcccaagagccaggagaccccggccaccaagaaggctgtgcaaggcgggggagccacccccgtggtgggggctgtccaggggcctgtcccgggcatgccgccgatgactcaggcgccccgcattatgcaccacatgccgggccagccgccctacatgccgccccctggtatgatccccccgccaggccttgcacctggccagatcccaccaggggccatgcccccgcagcagcttatgccaggacagatgccccctgcccagcctctttctgagaatccaccgaatcacatcttgttcctcaccaacctgccagaggagaccaacgagctcatgctgtccatgcttttcaatcagttccctggcttcaaggaggtccgtctggtacccgggcggcatgacatcgccttcgtggagtttgacaatgaggtacaggcaggggcagctcgcgatgccctgcagggctttaagatcacgcagaacaacgccatgaagatctcctttgccaagaagtagcaccttttccccccatgcctgccccttcccctgttctggggccacccctttcccccttggctcagccccctgaaggtaagtccccccttgggggccttcttggagccgtgtgtgagtgagtggtcgccacacagcattgtacccagagtctgtccccagacattgcacctggcgctgttaggccggaattaaagtggctttttgaggtttggtttttcacaatcatttgtctgtctgattttcttgctcttcatggttcctttccctccacctcagcagcacatcctgggtttttggacctcttggcattttgaggtttgcaaccttggggaaacataggatagtgtagtaatattgttcaaactcaggttacaatgactactttggcagttttgtatgttgtcccaattcacagcaggaaatggaatcctgggtcaggaaatggaaagtcagggctgccgcgtacagttaggcaggatgggtactgcacaagaatggcaccttttaagggcacaccattcactttgtaggcttacaagtttatgccaccacttttctaacagatgacaagagtgtccagggagaggtgtctcttcaccctttttttactcttctcaaaagtgcag

SEQ ID NO: 244 - DNA, 1366 bp, Homo sapiens
  misc_feature: Incyte ID No: 369950.12
ctttgtcctccagtggctggtaggcagtggctgggaggcagcggcccaattagtgtcgtgcggcccgtggcgaggcgaggtccggggagcgagcgagcaagcaaggcgggaggggtggccggagctgcggcggctggcacaggaggaggagcccgggcgggcgaggggcggccggagagcgccagggcctgagctgccggagcggcgcctgtgagtgagtgcagaaagcaggcgcccgcgcgctagccgtggcaggagcagcccgcacgccgcgctctctccctgggcgacctgcagtttgcaatatgactttggaggaattctcggctggagagcagaagaccgaaaggatggataaggtgggggatgccctggaggaagtgctcagcaaagccctgagtcagcgcacgatcactgtcggggtgtacgaagcggccaagctgctcaacgtcgaccccgataacgtggtgttgtgcctgctggcggcggacgaggacgacgacagagatgtggctctgcagatccacttcaccctgatccaggcgttttgctgcgagaacgacatcaacatcctgcgcgtcagcaacccgggccggctggcggagctcctgctcttggagaccgacgctggccccgcggcgagcgagggcgccgagcagcccccggacctgcactgcgtgctggtgacgaatccacattcatctcaatggaaggatcctgccttaagtcaacttatttgtttttgccgggaaagtcgctacatggatcaatgggttccagtgattaatctccctgaacggtgatggcatctgaatgaaaataactgaaccaaattgcactgaagtttttgaaatacctttgtagttactcaagcagttactccctacactgatgcaaggattacagaaactgatgccaaggggctgagtgagttcaactacatgttctgggggcccggagatagatgactttgcagatggaaagaggtgaaaatgaagaaggaagctgtgttgaaacagaaaaataagtcaaaaggaacaaaaattacaaagaaccatgcaggaaggaaaactatgtattaatttagaatggttgagttacattaaaataaaccaaatatgttaaagtttaagtgtgcagccatagtttgggtatttttggtttatatgccctcaagtaaaagaaaagccgaaagggttaatcatatttgaaaaccatattttattgtattttgatgagatattaaattctcaaagttttattataaattctactaagttattttatgacatgaaaagttatttatgctataaattttttgaaacacaatacctacaataaactggtatgaataattgcatcattt

SEQ ID NO: 245 - DNA, 2541 bp, Homo sapiens
  misc_feature: Incyte ID No: 331403.8
tgtttttcccgcgaaactcggcggctgagcgtggaggttcttgtctcccctggtttgtgaagtgcggaaaaccagaggcgcagtcatgtcgggattcgacgatcctggcattttctacagcgacagcttcgggggcgacgcccaggccgacgaggggcaggcccgcaaatcgcagctgcagaggcgcttcaaggagttcctgcggcagtaccgagtgggcaccgaccgcacgggcttcaccttcaaatacagggatgaactcaagcggcattacaacctgggggagtactggattgaggtggagatggaggatctggccagctttgatgaggacctggccgactacttgtacaagcagccagccgagcacctgcagctgctggaggaagctgccaaggaggtagctgatgaggtgacccggccccggccttctggggaggaggtgctccaggacatccaggtcatgctcaagtcggacgccagcccttccagcattcgtagcctgaagtcggacatgatgtcacacctggtgaagatccctggcatcatcatcgcggcctctgcggtccgtgccaaggccacccgcatctctatccagtgccgcagctgccgcaacaccctcaccaacattgccatgcgccctggcctcgagggctatgccctgcccaggaagtgcaacacagatcaggctgggcgccccaaatgcccattggacccgtacttcatcatgcccgacaaatgcaaatgcgtggacttccagaccctgaagctgcaggagctgcctgatgcagtcccccacggggagatgcccagacacatgcagctctactgcgacaggtacctgtgtgacaaggtcgtccctgggaacagggttaccatcatgggcatctactccatcaagaagtttggcctgactaccagcaggggccgtgacagggtgggcgtgggcatccgaagctcctacatccgtgtcctgggcatccaggtggacacagatggctctggccgcagctttgctggggccgtgagcccccaggaggaggaggagttccgtcgcctggctgccctcccaaatgtctatgaggtcatctccaagagcatcgccccctccatctttgggggcacagacatgaagaaggccattgcctgcctgctctttgggggctcccgaaagaggctccctgatggacttactcgccgaggagacatcaacctgctgatgctaggggaccctgggacagccaagtcccagcttctgaagtttgtggagaagtgttctcccattggggtatacacgtctgggaaaggcagcagcgcagctggactgacagcctcggtgatgagggacccttcgtcccggaatttcatcatggagggcggagccatggtcctggccgatggtggggtcgtctgtattgacgagtttgacaagatgcgagaagatgaccgtgtggcaatccacgaagccatggagcagcagaccatctctatcgccaaggctgggatcaccaccaccctgaactcccgctgctccgtcctggctgctgccaactcagtgttcggccgctgggatgagacgaagggggaggacaacattgacttcatgcccaccatcttgtcgcgcttcgacatgatcttcatcgtcaaggatgagcacaatgaggagagggatgtgatgctggccaagcatgtcatcactctgcacgtgagcgcactgacacagacacaggctgtggagggcgagattgacctggccaagctgaagaagtttattgcctactgccgagtgaagtgtggcccccggctgtcagcagaggctgcagagaaactgaagaaccgctacatcatcatgcggagcggggcccgtcagcacgagagggacagtgaccgccgctccagcatccccatcactgtgcggcagctggaggccattgtgcgcatcgcggaagccctcagcaagatgaagctgcagcccttcgccacagaggcagatgtggaggaggccctgcggctcttccaagtgtccacgttggatgctgccttgtccggtaccctgtcaggggtggagggcttcaccagccaggaggaccaggagatgctgagccgcatcgagaagcagctcaagcgccgctttgccattggctcccaggtgtctgagcacagcatcatcaaggacttcaccaagcagaaatacccggagcacgccatccacaaggtgctgcagctcatgctgcggcgcggcgagatccagcatcgcatgcagcgcaaggttctctaccgcctcaagtgagtcgcgccgcctcactggactcatggactcgcccacgcctcgcccctcctgccgctgcctgccattgacaatgttgctgggacctctgcctccccactgcagccctcgaacttcccaggcaccctcctttctgccccagaggaaggagctgtagtgtcctgctgcctctgggcgcccgcctctagcgcggttctgggaagtgtgcttttggcatccgttaataataaagccacggtgtgttcaggtaaaaa

SEQ ID NO: 246 - DNA, 997 bp, Homo sapiens
  misc_feature: Incyte ID No: 233889.3
ggacggtggtgacggtggggacatcaggctgccccgcagtaccagggagcgactgaagtgcccatgccgcttgctccggagaagaaaatttgaagttacttctgtggctaactttatagttctattggacatcaccgaccgctctaggctatggaaaattctgtagaacaaacaactggaagttggaagaaaagacagtaagaaatagcaaggaagggtgtgctgttgggagttgcttggaggttggcggcgcggggctgaaggctagcaaaccgagcgatcatgtcgcacaaacaaatttactattcggacaaatacgacgacgaggagtttgagtatcgacatgtcatgctgcccaaggacatagccaagctggtccctaaaacccatctgatgtctgaatctgaatggaggaatcttggcgttcagcagagtcagggatgggtccattatatgatccatgaaccagaacctcacatcttgctgttccggcgcccactacccaagaaaccaaagaaatgaagctggcaagctacttttcagcctcaagctttacacagctgtccttacttcctaacatctttctgataacattattatgttgccttcttgtttctcactttgatatttaaaagatgttcaatacactgtttgaatgtgctggtaactgctttgcttcttgagtagagccaccaccaccatagcccagccagatgagtgctctgtggacccacagcctaagctgagtgtgaccccagaagccacgatgtgctctgtatccagaacacacttggcagatggaggaagcatctgagtttgagaccatggctgttacagggatcatgtaaacttgctgtttttgttttttcctgccgggtgttgtatgtgtggtgacttgcggatttatgtttcagtgtactggaaactttccattttattcaagaaatctgttcatgttaaaagccttgattaaagaggaagtttttataatctaaaa

SEQ ID NO: 247 - DNA, 1655 bp, Homo sapiens
  misc_feature: Incyte ID No: 021148.4
  unsure 1630: a, t, c, g, or other
gccgggggctggaggacaggtttgtgcgctggacgcaagcaccaggcgcagcctcgcttcgccgagacccggccagaacgtgttacgagtcagtttttagtgaaaaaacattgagctaggagccaagacccatctcttcactattttggtattgtgcaagtcatcttacctctctggatctcagttgtctcatccgtaaaaaggagataaaaattatttacctgcctgaacatgaggtggaggaccatcctgctacagtattgctttctcttgattacatgtttacttactgctcttgaagctgtgcctattgacatagacaagacaaaagtacaaaatattcaccctgtggaaagtgcgaagatagaaccaccagatactggactttattatgatgaatatctcaagcaagtgattgatgtgctggaaacagataaacacttcagagaaaagctccagaaagcagacatagaggaaataaagagtgggaggctaagcaaagaactggatttagtaagtcaccatgtgaggacaaaacttgatgaactgaaaaggcaagaagtaggaaggttaagaatgttaattaaagctaagttggattcccttcaagatataggcatggaccaccaagctcttctaaaacaatttgatcacctaaaccacctgaatcctgacaagtttgaatccacagatttagatatgctaatcaaagcggcaacaagtgatctggaacactatgacaagactcgtcatgaagaatttaaaaaatatgaaatgatgaaggaacatgaaaggagagaatatttaaaaacattgaatgaagaaaagagaaaagaagaagagtctaaatttgaagaaatgaagaaaaagcatgaaaatcaccctaaagttaatcacccacaattttttaaaattggttcacagggaagcaaagatcaactaaaagaggtatgggaagagactgatggattggatcctaatgactttgaccccaagacatttttcaaattacatgatgtcaatagtgatggattcctggatgaacaagaattagaagccctatttactaaagagttggagaaagtatatgaccctaaaaatgaagaggatgatatggtagaaatggaagaagaaaggcttagaatgagggaacatgtaatgaatgaggttgatactaacaaagacagattggtgactctggaggagtttttgaaagccacagaaaaaaaagaattcttggagccagatagctgggagacattagatcagcaacagttcttcacagaggaagaactaaaagaatatgaaaatattattgctttacaagaaaatgaacttaagaagaaggcagatgagcttcagaaacaaaaagaagagctacaacgtcagcatgatcaactggaggctcagaagctggaatatcatcaggtcatacagcagatggaacaaaaaaaattacaacaaggaattcctccatcagggccagctggagaattgaagtttgagccacacatttaaagtctgaagtccaccagaacttggaagaaagctgttaactcaacatctatttcatctttttagctcccttcctttttctctgctcaataaatattttaaaagcatatttggnataaagggagatacttttttaaatg

SEQ ID NO: 248 - DNA, 3230 bp, Homo sapiens
  misc_feature: Incyte ID No: 976749.1
tagcgctgagtggtttttcggatcatgtctggtggctccgcggattataacagcagagaacatggcggcccagagggaatggaccccgatggtgtcatcgagagcaactggaatgagattgttgataactttgatgatatgaatttaaaggagtctctccttcgtggcatctatgcttacggttttgagaagccttccgctattcagcagagagctattattccctgtattaaagggtatgatgtgattgctcaagctcagtcaggtactgggcaagacagccacatttgctatttccatcctgcaacagttggagattgagttcaaggagacccaagcactagtattggcccccaccagagaactggctcaacagatccaaaaggtaattctggcacttggagactatatgggagccacttgtcatgcctgcattggtggaacaaatgttcgaaatgaaatgcaaaaactgcaggctgaagcaccacatattgttgttggtacacccgggagagtgtttgatatgttaaacagaagatacctttctccaaaatggatcaaaatgtttgttttggatgaagcagatgaaatgttgagccgtggttttaaggatcaaatctatgagattttccaaaaactaaacacaagtattcaggttgtgttgctttctgccacaatgccaactgatgtgttggaagtgaccaaaaaattcatgagagatccaattcgaattctggtgaaaaaggaagaattgacccttgaaggaatcaaacagttttatattaatgttgagagagaggaatggaagttggatacactttgtgacttgtacgagacactgaccattacacaggctgttatttttctcaatacgaggcgcaaggtggactggctgactgagaagatgcatgccagagacttcacagtttctgctctgcatggtgacatggaccagaaggagagagatgttatcatgagggaattccggtcagggtcaagtcgtgttctgatcactactgacttgttggctcgcgggattgatgtgcaacaagtgtctttggttataaattatgatctacctaccaatcgtgaaaactatattcacagaattggcagagggggtcgatttgggaggaaaggtgtggctataaactttgttactgaagaagacaagaggattcttcgtgacattgagactttctacaatactacagtggaggagatgcccatgaatgtggctgaccttatttaattcctgggatgagagttttggatgcagtgctcgctgttgctgaataggcgatcacaacgtgcattgtgcttctttctttgggaatatttgaatcttgtctcaatgctcataacggatcagaaatacagattttgatagcaaagcgacgttagtcgtgagctcttgtgaggaaagtcattggctttatcctctttagagttagactgttggggtgggtataaaagatggggtctgtaaaatctttctttcttagaaatttatttcctagttctgtagaaatggttgtattagatgttctctatcatttaataatatacttgtggactaaaagatataagtgctgtataaaatcagccaattatgttaaactagcatatctgcctttattgtgtttgtcattagcctgagtagaaaggcctttaaaatttttttagaaagcatttgaatgcattttgtttggtattgtatttattcaataaagtatttaattagtgctaagtgtgaactggaccctgttgctaagccccagcaagcaatcctaggtagggtttaatccccagtaaaattgccatattgcacatgtcttaatgaagtttgaatgttaaataaattgtatattcactttaaaggtgcttttggtcattttatttttattacaacttcattatttacaaaaccccccatccagatatattcacgttaacaattctgagataactgctgcatcacagttgcacaaaggctgatgagttgcaaatgttcatcagcaccatctgctaggcatttgtcaacttcggcaagtttttctgtgataatagacttctgtttatcagataagttattttctacaaccacatcatggagttgattgacgagctgagttgctgcatgaccctcatctattaaatccttgaccacagcttctagtttgtcaaaagagccactctgacaggcagcaaatactccatcaattttctcagctggtattaccccagcaatgtctgtaatcactttctctgtgatctcctttccacctgttaatcgagtagcgctttgaagaaatgtaatggcttttcttaagtctccttctgacactttaacaagataagctattccctcatcactaattttgacattttccttcttggcaatgtctagtaatcgctgctgttgaattttatctgacagaggcttgaagcggaattttgaacatctagaggtcaggggttcaattattcgactgacatagttacagataagacagaatcgggtggttttcgactccttctccatggtacgtcttaaagctgcctgagcagctgaggtcatagaatctgcttcatccagaatcacaatcttaaaaggcggacacggcttcccatctgagcgacttcctgacacagttaattgagcaaaatttttcactttctctcgaactacttgtattccacgttcatcagatgcatttaactcaagaactcttaatcggaaaagttcaggcccaaagagttctctagctgctgccaaaatagtggatgtttttccagttccaggtggtccgtaaaacaagagattaggaagatctgctccttctaaagattttttcagcactgcaaccacttcttcctggaaagcaacttcatccacacattttgggcgatatttttccacccagggaacgggtttggctttcttgttctctccgctacttcccgcactggcagctactcctcgatccttggtcagcgggggtttagtactgatggatgtacctttaagaaatgcttgcatggtacttcacccagttagcctggcttctcgtgcaggtcaccgccgccggctcgttcctcaggtttccgcgatacaaaaaggacgagatggtctcgaagtcttagctccgtcacctaatctgagaataacgggcccaggagacttacgatcactgatgtccccacagtcgcctcagttcccgccacgg

SEQ ID NO: 249 - DNA, 1068 bp, Homo sapiens
  misc_feature: Incyte ID No: 252719.12
  unsure 1063: a, t, c, g, or other
ctggttcggcccacctctgaaggttccagaatcgatagtgaattcgtggtttcctttggcggattttctgttttcggaagttgctgggttcgttttattcagcggcagtggtgctttcccgaatctcagaatgcctgttaaaagatcactgaagttggatggtctgttagaagaaaattcatttgatccttcaaaaatcacaaggaagaaaagtgttataacttattctccaacaactggaacttgtcaaatgagtctatttgcttctcccacaagttctgaagagcaaaagcacagaaatggactatcaaatgaaaagagaaaaaaattgaatcaccccagtttaactgaaagcaaagaatctacaacaaaagacaatgatgaattcatgatgttgctatcaaaagttgagaaattgtcagaagaaatcatggagataatgcaaaatttaagtagtatacaggctttggagggcagtagagagcttgaaaatctcattggaatctcctgtgcatcacatttcttaaaaagagaaatgcagaaaaccaaagaactaatgacaaaagtgaataaacaaaaactgtttgaaaagagtacaggacttcctcacaaaggtcagcctcagatgtcacaacctctgtgaagctctccccagctctcctagcatcacgtcatcttgacagctatgaattccttaaagccattttaaactgaggcattaagaagaaatgcactcaccatgagcaccaacttctgcatctgcctgatcatatttaaaggaacagagaaatatttgtaattaatctgcccagtaaataccagctcgtagcagttggcaggtgcatgtctagataaaatttcttgcagctaatttaaactttctacacgcaccagtagataatctcaatgtaaataatacatttcttcttggctctttaatgtaagccaacatggagaggaagatcttgacttatattctgtaccacatacacttctgtggacttttagcatttgtgggtagacttaataaagcatgtataaaagtggcaaaaaaaaaaaaaangggcg

SEQ ID NO: 250 - DNA, 4244 bp, Homo sapiens
  misc_feature: Incyte ID No: g6063478
gccgcgcggtagatgcggtgcttttaggagctccgtccgacagaacggttgggccttgccggctgtcggtatgtcgcgacagagcaccctgtacagcttcttccccaagtctccggcgctgagtgatgccaacaaggcctcggccagggcctcacgcgaaggcggccgtgccgccgctgcccccggggcctctccttccccaggcggggatgcggcctggagcgaggctgggcctgggcccaggcccttggcgcgctccgcgtcaccgcccaaggcgaagaacctcaacggagggctgcggagatcggtagcgcctgctgcccccaccagttgtgacttctcaccaggagatttggtttgggccaagatggagggttacccctggtggccttgtctggtttacaaccacccctttgatggaacattcatccgcgagaaagggaaatcagtccgtgttcatgtacagttttttgatgacagcccaacaaggggctgggttagcaaaaggcttttaaagccatatacaggttcaaaatcaaaggaagcccagaagggaggtcatttttacagtgcaaagcctgaaatactgagagcaatgcaacgtgcagatgaagccttaaataaagacaagattaagaggcttgaattggcagtttgtgatgagccctcagagccagaagaggaagaagagatggaggtaggcacaacttacgtaacagataagagtgaagaagataatgaaattgagagtgaagaggaagtacagcctaagacacaaggatctaggcgaagtagccgccaaataaaaaaacgaagggtcatatcagattctgagagtgacattggtggctctgatgtggaatttaagccagacactaaggaggaaggaagcagtgatgaaataagcagtggagtgggggatagtgagagtgaaggcctgaacagccctgtcaaagttgctcgaaagcggaagagaatggtgactggaaatggctctcttaaaaggaaaagctctaggaaggaaacgccctcagccaccaaacaagcaactagcatttcatcagaaaccaagaatactttgagagctttctctgcccctcaaaattctgaatcccaagcccacgttagtggaggtggtgatgacagtagtcgccctactgtttggtatcatgaaactttagaatggcttaaggaggaaaagagaagagatgagcacaggaggaggcctgatcaccccgattttgatgcatctacactctatgtgcctgaggatttcctcaattcttgtactcctgggatgaggaagtggtggcagattaagtctcagaactttgatcttgtcatctgttacaaggtggggaaattttatgagctgtaccacatggatgctcttattggagtcagtgaactggggctggtattcatgaaaggcaactgggcccattctggctttcctgaaattgcatttggccgttattcagattccctggtgcagaagggctataaagtagcacgagtggaacagactgagactccagaaatgatggaggcacgatgtagaaagatggcacatatatccaagtatgatagagtggtgaggagggagatctgtaggatcattaccaagggtacacagacttacagtgtgctggaaggtgatccctctgagaactacagtaagtatcttcttagcctcaaagaaaaagaggaagattcttctggccatactcgtgcatatggtgtgtgctttgttgatacttcactgggaaagtttttcataggtcagttttcagatgatcgccattgttcgagatttaggactctagtggcacactatcccccagtacaagttttatttgaaaaaggaaatctctcaaaggaaactaaaacaattctaaagagttcattgtcctgttctcttcaggaaggtctgatacccggctcccagttttgggatgcatccaaaactttgagaactctccttgaggaagaatattttagggaaaagctaagtgatggcattggggtgatgttaccccaggtgcttaaaggtatgacttcagagtctgattccattgggttgacaccaggagagaaaagtgaattggccctctctgctctaggtggttgtgtcttctacctcaaaaaatgccttattgatcaggagcttttatcaatggctaattttgaagaatatattcccttggattctgacacagtcagcactacaagatctggtgctatcttcaccaaagcctatcaacgaatggtgctagatgcagtgacattaaacaacttggagatttttctgaatggaacaaatggttctactgaaggaaccctactagagagggttgatacttgccatactccttttggtaagcggctcctaaagcaatggctttgtgccccactctgtaaccattatgctattaatgatcgtctagatgccatagaagacctcatggttgtgcctgacaaaatctccgaagttgtagagcttctaaagaagcttccagatcttgagaggctactcagtaaaattcataatgttgggtctcccctgaagagtcagaaccacccagacagcagggctataatgtatgaagaaactacatacagcaagaagaagattattgattttctttctgctctggaaggattcaaagtaatgtgtaaaattatagggatcatggaagaagttgctgatggttttaagtctaaaatccttaagcaggtcatctctctgcagacaaaaaatcctgaaggtcgttttcctgatttgactgtagaattgaaccgatgggatacagcctttgaccatgaaaaggctcgaaagactggacttattactcccaaagcaggctttgactctgattatgaccaagctcttgctgacataagagaaaatgaacagagcctcctggaatacctagagaaacagcgcaacagaattggctgtaggaccatagtctattgggggattggtaggaaccgttaccagctggaaattcctgagaatttcaccactcgcaatttgccagaagaatacgagttgaaatctaccaagaagggctgtaaacgatactggaccaaaactattgaaaagaagttggctaatctcataaatgctgaagaacggagggatgtatcattgaaggactgcatgcggcgactgttctataactttgataaaaattacaaggactggcagtctgctgtagagtgtatcgcagtgttggatgttttactgtgcctggctaactatagtcgagggggtgatggtcctatgtgtcgcccagtaattctgttgccggaagataccccccccttcttagagcttaaaggatcacgccatccttgcattacgaagactttttttggagatgattttattcctaatgacattctaataggctgtgaggaagaggagcaggaaaatggcaaagcctattgtgtgcttgttactggaccaaatatggggggcaagtctacgcttatgagacaggctggcttattagctgtaatggcccagatgggttgttacgtccctgctgaagtgtgcaggctcacaccaattgatagagtgtttactagacttggtgcctcagacagaataatgtcaggtgaaagtacattttttgttgaattaagtgaaactgccagcatactcatgcatgcaacagcacattctctggtgcttgtggatgaattaggaagaggtactgcaacatttgatgggacggcaatagcaaatgcagttgttaaagaacttgctgagactataaaatgtcgtacattattttcaactcactaccattcattagtagaagattattctcaaaatgttgctgtgcgcctaggacatatggcatgcatggtagaaaatgaatgtgaagaccccagccaggagactattacgttcctctataaattcattaagggagcttgtcctaaaagctatggctttaatgcagcaaggcttgctaatctcccagaggaagttattcaaaagggacatagaaaagcaagagaatttgagaagatgaatcagtcactacgattatttcgggaagtttgcctggctagtgaaaggtcaactgtagatgctgaagctgtccataaattgctgactttgattaaggaattatagactgactacattggaagctttgagttgacttctgacaaaggtggtaaattcagacaacattatgatctaataaactttattttttaaaaat

SEQ ID NO: 251 - DNA, 2148 bp, Homo sapiens
  misc_feature: Incyte ID No: 347314.3
  unsure 107-160: a, t, c, g, or other
agctcttggaagacttgggtccttgggtcgcaggtgggagccgacggggtctcactccattgcccaggccagagtgcggggatatttgataagaaacttcagtgaannnnnnnnnnnnnnnnnnnnnnnnnnnnnnnnnnnnnnnnnnnnnnnnnnnnnntcatggaccgatctaaagaaaactgcatttcaggacctgttaaggctacagctccagttggaggtccaaaacgtgttctcgtgactcagcaatttccttgtcagaatccattacctgtaaatagtggccaggctcagcgggtcttgtgtccttcaaattcttcccagcgcgttcctttgcaagcacaaaagcttgtctccagtcacaagccggttcagaatcagaagcagaagcaattgcaggcaaccagtgtacctcatcctgtctccaggccactgaataacacccaaaagagcaagcagcccctgccatcggcacctgaaaataatcctgaggaggaactggcatcaaaacagaaaaatgaagaatcaaaaaagaggcagtgggctttggaagactttgaaattggtcgccctctgggtaaaggaaagtttggtaatgtttatttggcaagagaaaagcaaagcaagtttattctggctcttaaagtgttatttaaagctcagctggagaaagccggagtggagcatcagctcagaagagaagtagaaatacagtcccaccttcggcatcctaatattcttagactgtatggttatttccatgatgctaccagagtctacctaattctggaatatgcaccacttggaacagtttatagagaacttcagaaactttcaaagtttgatgagcagagaactgctacttatataacagaattggcaaatgccctgtcttactgtcattcgaagagagttattcatagagacattaagccagagaacttacttcttggatcagctggagagcttaaaattgcagattttgggtggtcagtacatgctccatcttccaggaggaccactctctgtggcaccctggactacctgccccctgaaatgattgaaggtcggatgcatgatgagaaggtggatctctggagccttggagttctttgctatgaatttttagttgggaagcctccttttgaggcaaacacataccaagagacctacaaaagaatatcacgggttgagaattcacattccctgactttgtaacagagggagccagggacctcatttcaagactgttgaagcataatcccagccagaggccaatgctcagagaagtacttgaacacccctggatcacagcaaattcatcaaaaccatcaaattgccaaaacaaagaatcagctagcaaacagtcttaggaatcgtgcagggggagaaatccttgagccagggctgccatataacctgacaggaacatgctactgaagtttattttaccattgactgctgccctcaatctagaacgctacacaagaaatatttgttttactcagcaggtgtgccttaacctccctattcagaaagctccacatcaataaacatgacactctgaagtgaaagtagccacgagaattgtgctacttatactggttcataatctggaggcaaggttcgactgcagccgccccgtcagcctgtgctaggcatggtgtcttcacaggaggcaaatccagagcctggctgtggggaaagtgaccactctgccctgaccccgatcagttaaggagctgtgcaataaccttcctagtacctgagtgagtgtgtaacttattgggttggcgaagcctggtaaagctgttggaatgagtatgtgattctttttaagtatgaaaataaagatatatgtacagacttgtattttttctctggtggcattcctttaggaatgctgtgtgtctgtccggcaccccggtaggcctgattgggtttctagtcctccttaaccacttatctcccatatgagagtgtgaaaaataggaacacgtgctctacctccatttagggatttgcttgggatacagaagaggccatgtgtctcagagctgttaagggcttatttttttaaaacattggagtcatagcatgtgtgtaaactttaaatatgcaaataaataagtatctatgtctgtg

SEQ ID NO: 252 - DNA, 2237 bp, Homo sapiens
  misc_feature: Incyte ID No: g3213196
ggaagacttgggtccttgggtcgcaggtgggagccgacgggtgggtagaccgtgggggatatctcagtggcggacgaggacggcggggacaaggggcggctggtcggagtggcggagcgtcaagtcccctgtcggttcctccgtccctgagtgtccttggcgctgccttgtgcccgcccagcgcctttgcatccgctcctgggcaccgaggcgccctgtaggatactgcttgttacttattacagctagaggcatcatggaccgatctaaagaaaactgcatttcaggacctgttaaggctacagctccagttggaggtccaaaacgtgttctcgtgactcagcaaattccttgtcagaatccattacctgtaaatagtggccaggctcagcgggtcttgtgtccttcaaattcttcccagcgcgttcctttgcaagcacaaaagcttgtctccagtcacaagccggttcagaatcagaagcagaagcaattgcaggcaaccagtgtacctcatcctgtctccaggccactgaataacacccaaaagagcaagcagcccctgccatcggcacctgaaaataatcctgaggaggaactggcatcaaaacagaaaaatgaagaatcaaaaaagaggcagtgggctttggaagactttgaaattggtcgccctctgggtaaaggaaagtttggtaatgtttatttggcaagagaaaagcaaagcaagtttattctggctcttaaagtgttatttaaagctcagctggagaaagccggagtggagcatcagctcagaagagaagtagaaatacagtcccaccttcggcatcctaatattcttagactgtatggttatttccatgatgctaccagagtctacctaattctggaatatgcaccacttggaacagtttatagagaacttcagaaactttcaaagtttgatgagcagagaactgctacttatataacagaattggcaaatgccctgtcttactgtcattcgaagagagttattcatagagacattaagccagagaacttacttcttggatcagctggagagcttaaaattgcagattttgggtggtcagtacatgctccatcttccaggaggaccactctctgtggcaccctggactacctgccccctgaaatgattgaaggtcggatgcatgatgagaaggtggatctctggagccttggagttctttgctatgaatttttagttgggaagcctccttttgaggcaaacacataccaagagacctacaaaagaatatcacgggttgaattcacattccctgactttgtaacagagggagccagggacctcatttcaagactgttgaagcataatcccagccagaggccaatgctcagagaagtacttgaacacccctggatcacagcaaattcatcaaaaccatcaaattgccaaaacaaagaatcagctagcaaacagtcttaggaatcgtgcagggggagaaatccttgagccagggctgccatataacctgacaggaacatgctactgaagtttattttaccattgactgctgccctcaatctagaacgctacacaagaaatatttgttttactcagcaggtgtgccttaacctccctattcagaaagctccacatcaataaacatgacactctgaagtgaaagtagccacgagaattgtgctacttatactggttcataatctggaggcaaggttcgactgcagccgccccgtcagcctgtgctaggcatggtgtcttcacaggaggcaaatccagagcctggctgtggggaaagtgaccactctgccctgaccccgatcagttaaggagctgtgcaataaccttcctagtacctgagtgagtgtgtaacttattgggttggcgaagcctggtaaagctgttggaatgagtatgtgattctttttaagtatgaaaataaagatatatgtacagacttgtattttttctctggtggcattcctttaggaatgctgtgtgtctgtccggcaccccggtaggcctgattgggtttctagtcctccttaaccacttatctcccatatgagagtgtgaaaaataggaacacgtgctctacctccatttagggatttgcttgggatacagaagaggccatgtgtctcagagctgttaagggcttatttttttaaaacattggagtcatagcatgtgtgtaaactttaaatatgcaaataaataagtatctatgtct

SEQ ID NO: 253 - DNA, 2790 bp, Homo sapiens
  misc_feature: Incyte ID No: 245184.3
ctggagccgcccgcttgcccgtcggtcgctagctcgctcggtgcgcgtcgtcccgctccatggcgctcttcgtgcggctgctggctctcgccctggctctggccctgggccccgccgcgaccctggcgggtcccgccaagtcgccctaccagctggtgctgcagcacagcaggctccggggccgccagcacggccccaacgtgtgtgctgtgcagaaggttattggcactaataggaagtacttcaccaactgcaagcagtggtaccaaaggaaaatctgtggcaaatcaacagtcatcagctacgagtgctgtcctggatatgaaaaggtccctggggagaagggctgtccagcagccctaccactctcaaacctttacgagaccctgggagtcgttggatccaccaccactcagctgtacacggaccgcacggagaagctgaggcctgagatggaggggcccggcagcttcaccatcttcgcccctagcaacgaggcctgggcctccttgccagctgaagtgctggactccctggtcagcaatgtcaacattgagctgctcaatgccctccgctaccatatggtgggcaggcgagtcctgactgatgagctgaaacacggcatgaccctcacctctatgtaccagaattccaacatccagatccaccactatcctaatgggattgtaactgtgaactgtgcccggctgctgaaagccgaccaccatgcaaccaacggggtggtgcacctcatcgataaggtcatctccaccatcaccaacaacatccagcagatcattgagatcgaggacacctttgagacccttcgggctgctgtggctgcatcagggctcaacacgatgcttgaaggtaacggccagtacacgcttttggccccgaccaatgaggccttcgagaagatccctagtgagactttgaaccgtatcctgggcgacccagaagccctgagagacctgctgaacaaccacatcttgaagtcagctatgtgtgctgaagccatcgttgcggggctgtctgtagagaccctggagggcacgacactggaggtgggctgcagcggggacatgctcactatcaacgggaaggcgatcatctccaataaagacatcctagccaccaacggggtgatccactacattgatgagctactcatcccagactcagccaagacactatttgaattggctgcagagtctgatgtgtccacagccattgaccttttcagacaagccggcctcggcaatcatctctctggaagtgagcggttgaccctcctggctcccctgaattctgtattcaaagatggaacccctccaattgatgcccatacaaggaatttgcttcggaaccacataattaaagaccagctggcctctaagtatctgtaccatggacagaccctggaaactctgggcggcaaaaaactgagagtttttgtttatcgtaatagcctctgcattgagaacagctgcatcgcggcccacgacaagagggggaggtacgggaccctgttcacgatggaccgggtgctgacccccccaatggggactgtcatggatgtcctgaagggagacaatcgctttagcatgctggtagctgccatccagtctgcaggactgacggagaccctcaaccgggaaggagtctacacagtcttcgctcccacaaatgaagccttccgagccctgccaccaagagaacggagcagactcttgggagatgccaaggaacttgccaacatcctgaaataccacattggtgatgaaatcctggttagcggaggcatcggggccctggtgcggctaaagtctctccaaggtgacaagctggaagtcagcttgaaaaacaatgtggtgagtgtcaacaaggagcctgttgccgagcctgacatcatgggccacaaatggcgtggtccatgtcatcaccaatgttctgcagcctccagccaacagacctcaggaaagaggggatgaacttgcagactctgcgcttgagatcttcaaacaagcatcagcgttttccagggcttcccagaggtctgtgcgactagcccctgtctatcaaaagttattagagaggatgaagcattagcttgaagcactacaggaggaatgcaccacggcagctctccgccaatttctctcagatttccacagagactgtttgaatgttttcaaaaccaagtatcacactttaatgtacatgggccgcaccataatgagatgtgagccttgtgcatgtgggggaggagggagagagatgtactttttaaatcatgttccccctaaacatggctgttaacccactgcatgcagaaacttggatgtcactgcctgacattcacttccagagaggacctatcccaaatgtggaattgactgcctatgccaagtccctggaaaaggagcttcagtattgtggggctcataaaacatgaatcaagcaatccagcctcatgggaagtcctggcacagtttttgtaaagcccttgcacagctggagaaatggcatcattataagctatgagttgaaatgttctgtcaaatgtgtctcacatctacacgtggcttggaggcttttatggggccctgtccaggtagaaaagaaatggtatgtagagcttagatttccctattgtgacagagccatggtgtgtttgtaataataaaaccaaagaaacataaaagcctccaagcaacgtgtagatgtgagacacatttgacagaacatctcaactcatagcttataatgatgccatttctccagctg

SEQ ID NO: 254 - DNA, 836 bp, Homo sapiens
  misc_feature: Incyte ID No: 243574.11
gtcctgcctgaaggcgggggtggaccagatgatctttcttgggccctgggcctagattcgaggtccccagggtccaagtcctgggttcagagggcggggcgcgaggggcggtgtctccaaggggcggggtcccggggtccctgaaaggcgcggaccaggccggatccacccagtctcgcgcctgcagcccgtgccgccccagccgctgccgcctgcaccggacccggagccgccatgcccaagtgtcccaagtgcaacaaggaggtgtacttcgccgagaggggtgacctctctgggcaaggactggcatcggccctgcctgaagtgcgagaaatgtgggaagacgctgacctctgggggccacgctgagcacgaaggcaaaccctactgcaaccacccctgctacgtagccatgtttgggcctaaaggctttgggcggggcggagccgagagccacactttcaagtaaaccaggtggtggagaccccatccttggctgcttgcagggccactgtccaggcaaatgccaggccttgtccccagatgcccagggctcccttgttgcccctaatgctctcagtaaacctgaacactgggggccacgctgagcacgaaggcaaaccctactgcaaccacccctgctacgcagccatgtttgggcctaaaggctttgggcggggcggagccgagagccacactttcaagtaaaccaggtggtggagaccccatccttggctgcttgcagggccactgtccaggcaaatgccaggccttgtccccagatgcccagggctcccttgttgcccctaatgctctcagtaaacctgaacacttgg

SEQ ID NO: 255 - DNA, 5991 bp, Homo sapiens
  misc_feature: Incyte ID No: 474826.6
ccggccccgggacgcgagggggctgccaggggcgtccggttacatccccgccttcctctgtcctggccgcgggaccgggtttgcgggaccgcagttcgggaacatgttggcctcgagcagccggatccgggctgcgtggacgcgggcgctgctgctgccgctgctgctggcggggcctgtgggctgcctgagccgccaggagctctttcccttcggccccggacagggggacctggagctggaggacggggatgacttcgtctctcctgccctggagctgagtggggcgctccgcttctacgacagatccgacatcgacgcagtctacgtcaccacaaatggcatcattgctacgagtgaacccccggccaaagaatcccatcccgggctcttcccaccaacattcggtgcagtcgcccctttcctggcggacttggacacgaccgatggcctggggaaggtttattatcgagaagacttatccccctccatcactcagcgagcagcagagtgtgtccacagagggttcccggagatctctttccagcctagtagcgcggtggttgtcacttgggaatccgtggccccctaccaagggcccagcagggacccagaccagaaaggcaagagaaacacgttccaggctgttctagcctcctctgattccagctcctatgccattttcctttatcctgaggatggtctgcagttccatacgacattctcaaagaaggaaaacaaccaagttcctgccgtggttgcattcagtcaaggttcagtgggattcttatggaagagcaacggagcttataacatatttgctaatgacagggaatcaattgaaaatttggccaagagtagtaactctgggcagcagggtgtctgggtgtttgagattgggagtccagccaccaccaatggcgtggtgcctgcagacgtgatcctcggaactgaagatggggcagagtatgatgatgaggatgaagattatgacctggcgaccactcgtctgggcctggaggatgtgggcaccacgcccttctcctacaaggctctgagaaggggaggtgctgacacatacagtgtgcccagcgtcctctccccgcgccgggcagctaccgaaaggccccttggacctcccacagagagaaccaggtctttccagttggcagtggagacttttcaccagcagcaccctcaggtcatagatgtggatgaagttgaggaaacaggagttgttttcagctataacacggattcccgccagacgtgtgctaacaacagacaccagtgctcggtgcacgcagagtgcagggactacgccacgggcttctgctgcagctgtgtcgctggctatacgggcaatggcaggcaatgtgttgcagaaggttccccccagcgagtcaatggcaaggtgaaaggaaggatctttgtggggagcagccaggtccccattgtctttgagaacactgacctccactcttacgtagtaatgaaccacgggcgctcctacacagccatcagcaccattcccgagaccgttggatattctctgcttccactggccccagttggaggcatcattggatggatgtttgcagtggagcaggacggattcaagaatgggttcagcatcaccgggggtgagttcactcgccaggctgaggtgaccttcgtggggcacccgggcaatctggtcattaagcagcggttcagcggcatcgatgagcatgggcacctgaccatcgacacggagctggagggccgcgtgccgcagattccgttcggctcctccgtgcacattgagccctacacggagctgtaccactactccacctcagtgatcacttcctcctccacccgggagtacacggtgactgagcccgagcgagatggggcatctccttcacgcatctacacttaccagtggcgccagaccatcaccttccaggaatgcgtccacgatgactcccggccagccctgcccagcacccagcagctctcggtggacagcgtgttcgtcctgtacaaccaggaggagaagatcttgcgctatgctctcagcaactccattgggcctgtgagggaaggctcccctgatgctcttcagaatccctgctacatcggcactcatgggtgtgacaccaacgcggcctgtcgccctggtcccaggacacagttcacctgcgagtgctccatcggcttccgaggagacgggcgaacctgctatgatattgatgaatgttcagaacaaccctcagtgtgtgggagccacacaatctgcaataatcacccaggaaccttccgctgcgagtgtgtggagggctaccagttttcagatgagggaacgtgtgtggctgtcgtggaccagcgccccatcaactactgtgaaactggccttcataactgcgacataccccagcgggcccagtgtatctacacaggaggctcctcctacacctgttcctgcttgccaggcttttctggggatggccaagcctgccaagatgtagatgaatgccagccaagccgatgtcaccctgacgccttctgctacaacactccaggctctttcacgtgccagtgcaaacctggttatcagggagacggcttccgttgcgtgcccggagaggtggagaaaacccggtgccagcacgagcgagaacacattctcggggcagcgggggcgacagacccacagcgacccattcctccggggctgttcgttcctgagtgcgatgcgcacgggcactacgcgcccacccagtgccacggcagcaccggctactgctggtgcgtggatcgcgacggccgcgaggtggagggcaccaggaccaggcccgggatgacgcccccgtgtctgagtacagtggctcccccgattcaccaaggacctgcggtgcctaccgccgtgatccccttgcctcctgggacccatttactctttgcccagactgggaagattgagcgcctgcccctggagggaaataccatgaggaagacagaagcaaaggcgttccttcatgtcccggctaaagtcatcattggactggcctttgactgcgtggacaagatggtttactggacggacatcactgagccttccattgggagagctagtctacatggtggagagccaaccaccatcattagacaagatcttggaagtccagaaggtatcgctgttgatcaccttggccgcaacatcttctggacagactctaacctggatcgaatagaagtggcgaagctggacggcacgcagcgccgggtgctctttgagactgacttggtgaatcccagaggcattgtaacggattccgtgagagggaacctttactggacagactggaacagagataaccccaagattgaaacttcctacatggacggcacgaaccggaggatccttgtgcaggatgacctgggcttgcccaatggactgaccttcgatgcgttctcatctcagctctgctgggtggatgcaggcaccaatcgggcggaatgcctgaaccccagtcagcccagcagacgcaaggctctcgaagggctccagtatccttttgctgtgacgagctacgggaagaatctgtatttcacagactggaagatgaattccgtggttgctctcgatcttgcaatttccaaggagacggatgctttccaaccccacaagcagacccggctgtatggcatcaccacggccctgtctcagtgtccgcaaggccataactactgctcagtgaacaatggcggctgcacccacctatgcttggccaccccagggagcaggacctgccgttgccctgacaacaccttgggagttgactgtatcgaacagaaatgaagacaagagtgccttatttcctttccaagtatttcacagcaacactctacttgaagcaacttggtccagattgaaaagtgtcctctggctgagtggccactaggcccagacccagcccagcctgagccccaacaacaacttttccctcactgttccccaaaacatgcaccctggacttctctaatagaaaagttccacccctacacaaggacagaaccctccacccctacccccaaccctcagacagacttatacacccctgagtgaggattacatgcccatcccagtgtcctaggaccttttcccaatactagccccccagtggtgaacagaacctcccaaatttgagttgcacccttccctgtggccttatgagctcagcctcgctttgaggtacccaccgtcctgtcagctccttgacctatgagccggggcctgactaggaaaagttgggagttaaggaggaaattagcattccttaatgttttgttttggtgctctgaatttcttctttattatagtcctatagttttactcctcagttcctcaccatcatcatcttgtctaagacccccattataatattcatgcgctgctttttcatcaaaacctaccctgtcctagagatctatgggcatttggtggatgataatgagcagcccctcccagatagaatgtcaatatttgagcagtaggatattggcatttgttagttaaaggcttaaatcaaaagaatgtccaatggtaggaatttcaaggtgtaggtcagatatttgagaataggggatttttttgatgtgccttaaattataccaaagattactaattattcctctttgcccaaaatacttgcatccaaggttctagtctctgttgctgtgctggtctttagccccactgcttgcactgatgtccctccttttcacggagacctatctgaggtacaggatggggctggcaccagatgatgtcccaccacagtccctcacctccggcctccacatgacagaaccaatttacactcaaccatgacctcacccctccttggtttctccctcgatctgtggccctttttggatgtattcttatctaacaacacaatccggaaagactgaattgaatatttatactaatggttcatatcctttattgctcaatgatctaattaaagggatcattgccacatttcatgtttatatttctacaatttgtttagaaaacatctcctgaccatatcagtagctcgtgttatctttttatcaactgcttcccagcgtcctaaaacaatagaaattttggattgaaaagttcagcataaggagtttgagtcagtaaaggatgggataaaggaatcgagatgattcaatgaaaagtatcacaaaaaaagagattgatcaacaagagaaataaaaaagcccaagaggaagtggtaggggaaggaatttaagaacagcaataagtaaaactcttaagtaactccaaaaagaaaatggtacattttgccaaagaccacttatacttgagaacatggaagaatttgcctgatactctctttggggaaaagagtctctcctcttttcctcaaaccccagtacactcagcctctctgccccaccttctcctgactttgtcctcacttgcttctgcagtacattggaacctgaattgaaagaaagtcttccttgaataattggagtttgtcttgagaggcaaatatagccccaagaatcacaagattcgaggaccatgtaggtcttttacgtagcccaaatccataaattagtctcactttttgtatttatcgtttcatattaaaccctctatatcaaatgttcatcatgattttgtatgatttttataactattttattcattttattagatttattctaaaattttttaatggtaaattcttaaactgtggaaaccactgaaggtgcttattaactgttctcccagatttgtacaagtattggatgattccttgagtttacagctgtacaaatagtgtgggcagaacccagggcatgaagatccaaaagggcctggttcagctttttctccagggccatggcagctttcatggcgtctggggttttaccccactcatcttcagctggcttcttgatgtcctggaagagagc

SEQ ID NO: 256 - DNA, 2889 bp, Homo sapiens
  misc_feature: Incyte ID No: 997347.6
ctggcaggcgtcgggacggtcgggccggtcccgcccgccccttcccctccacaggcccgccccggggcctgggccaactgaaaccgcgggaggaggaagcgcggaatcaggaactggccggggtccgcaccgggcctgagtcggtccgaggccgtcccaggagcagctgcccgtgcggaacagcactatgggcttctcttctgagctgtgcagcccccagggccacggggtcctgcagcaaatgcaggaggccgagcttcgtctactggagggcatgagaaagtggatggcccagcgggtcaagagtgacagggagtatgcaggactgcttcaccacatgtccctgcaggacagtgggggccagagccgggccatcagccctgacagccccatcagtcagtcctgggctgagatcaccagccaaactgaggggcctgagccgcttgctgcggcagcacgcagaggatctgaactcagggcccctgagcaagctgagcctgctcatccgggaacggcagcagcttcgcaagacctacagcgagcagtggcagcagctgcagcaggagctcaccaagacccacagccaggacattgagaagctgaagagccagtaccgagctctggcacgggacagtgcccaagccaagcgcaagtaccaggaggccagcaaagacaaggaccgtgacaaggccaaggacaagtatgtacgcagcctgtggaagctctttgctcaccacaaccgctatgtgctgggcgtgcgggctgcgcagctacaccaccagcaccaccaccagctcctgctgcccggcctgctgcggtcactgcaggacctgcacgaggagatggcttgcatcctgaaggagatcctgcaggaatacctggagattagcagcctggtgcaggatgaggtggtggccattcaccgggagatggctgcagctgctgcccgcatccagcctgaggctgagtaccaaggcttcctgcgacagtatgggtccgcacctgacgtcccaccctgtgtcacgttcgatgagtcactgcttgaggagggtgaaccgctggagcctggggagctccagctgaacgagctgactgtggagagcgtgcagcacacgctgacctcagtgacagatgagctggctgtggccaccgagatggtgttcaggcggcaggagatggttacgcagctgcaacaggagctccggaatgaagaggagaacacccacccccgggagcgggtgcagctgctgggcaagaggcaagtgctgcaagaagcactgcaggggctgcaggtagcgctgtgcagccaggccaagctgcaggcccagcaggagttgctgcagaccaagctggagcacctgggccccggcgagcccccgcctgtgctgctcctgcaggatgaccgccactccacgtcgtcctcggagcaggagcgagaggggggaaggacacccacgctggagatccttaagagccacatctcaggaatcttccgccccaagttctcgctccctccaccgctgcagctcattccggaggtgcagaagcccctgcatgagcagctgtggtaccacggggccatcccgagggcagaggtggctgagctgctggtgcactctggggacttcctggtgcgggagagccagggcaagcaggagtacgtgctgtcggtgctgtgggatggtctgccccggcacttcatcatccagtccttggataacctgtaccgactggaaggggaaggctttcctagcattcctttgctcatcgaccacctactgagcacccagcagcccctcaccaagaagagtggtgttgtcctgcacagggctgtgcccaaggacaagtgggtgctgaaccatgaggacctggtgttgggtgagcagattggacgggggaactttggcgaagtgttcagcggacgcctgcgagccgacaacaccctggtggcggtgaagtcttgtcgagagacgctcccacctgacctcaaggccaagtttctacaggaagcgaggatcctgaagcagtacagccaccccaacatcgtgcgtctcattggtgtctgcacccagaagcagcccatctacatcgtcatggagcttgtgcaggggggcgacttcctgaccttcctccgcacggagggggcccgcctgcgggtgaagactctgctgcagatggtgggggatgcagctgctggcatggagtacctggagagcaagtgctgcatccaccgggacctggctgctcggaactgcctggtgacagagaagaatgtcctgaagatcagtgactttgggatgtcccgagaggaagccgatggggtctatgcagcctcagggggcctcagacaagtccccgtgaagtggaccgcacctgaggcccttaactacggccgctactcctccgaaagcgacgtgtggagctttggcatcttgctctgggagaccttcagcctgggggcctccccctatcccaacctcagcaatcagcagacacgggagtttgtggagaaggggggccgtctgccctgcccagagctgtgtcctgatgccgtgttcaggctcatggagcagtgctgggcctatgagcctgggcagcggcccagcttcagcaccatctaccaggagctgcagagcatccgaaagcggcatcggtgaggctgggacccccttctcaagctggtggcctctgcaggcctaggtgcagctcctcagcggctccagctcatatgctgacagctcttcacagtcctggactcctgccaccagcatccacactgccggcaggatgcagcgccgtgtcctctctgtgtccctgctgctgccagggcttcctcttccgggcagaaacaataaaaccacttgtgcccactgaaaaaaaaaaaaaagg

SEQ ID NO: 257 - DNA, 1678 bp, Homo sapiens
  misc_feature: Incyte ID No: 222049.1
cgggaaggcgaaggacgcgcgttcccgggctcgtgaccgccagcggcccggggaacccgctcccagacagactcggagagatggcaggcggaagacaccggcgcgtcgtgggcaccctccacctgctgctgctggtggccgccctgccctgggcatccaggggggtcagtccgagtgcctcagcctggccagaggagaagaattaccaccagccagccattttgaattcatcggctcttcggcaaattgcagaaggcaccagtatctctgaaatgtggcaaaatgacttacagccattgctgatagagcgatacccgggatcccctggaagctatgctgctcgtcagcacatcatgcagcgaattcagaggcttcaggctgactgggtcttggaaatagacaccttcttgagtcagacaccctatgggtaccggtctttctcaaatatcatcagcaccctcaatcccactgctaaacgacatttggtcctcgcctgccactatgactccaagtatttttcccactggaacaacagagtgtttgtaggagccactgattcagccgtgccatgtgcaatgatgttggaacttgctcgtgccttagacaagaaactcctttccttaaagactgtttcagactccaagccagatttgtcactccagctgatcttctttgatggtgaagaggcttttcttcactggtctcctcaagattctctctatgggtctcgacacttagctgcaaagatggcatcgaccccgcacccacctggagcgagaggcaccagccaactgcatggcatggatttattggtcttattggatttgattggagctccaaacccaacgtttcccaatttttttccaaactcagccaggtggttcgaaagacttcaagcaattgaacatgaacttcatgaattgggtttgctcaaggatcactctttggaggggcggtatttccagaattacagttatggaggtgtgattcaggatgaccatattccatttttaagaagaggtgttccagttctgcatctgataccgtctcctttccctgaagtctggcacaccatggatgacaatgaagaaaatttggatgaatcaaccattgacaatctaaacaaaatcctacaagtctttgtgttggaatatcttcatttgtaatactctgatttagtttaggataattggttctagaattgaattcaaaagtcaaggcatcatttaaaataatctgatttcagacaaatgctgtgtggaaacatctatcctatagatcatcctattcttatgtgtctttggttatcagatcaattacagaataattgtgttgtgatattgtgtcctaaattgctcattaatttttatttacagattgaaaaagagggaccgtgtaaagaaaatggaaaataaatatctttcaaagactcttttagataaacacgatgaggcaaaatcaggttcattcattcaacgatagtttctaaacagtacttaaatagcggttggaaaacgtagccttcattttatgattttttcatatgtggaaatctattacatgtaatacaaaacaaacatgtagtttgaaggcggtcagatttctttgagaaatctttgtagagttaattttatggaaattaaaatcagaattaaatgctaaaaaaaaaaaaaaaaag

SEQ ID NO: 258 - DNA, 911 bp, Homo sapiens
  misc_feature: Incyte ID No: 902659.8
  unsure 871: a, t, c, g, or other
gtgtgcatgtgtatatatgtgtgtgtgcatgcatgtgtgtgtgcgcacgcatgtgtgtgtgcatgtgtgtgtgtgtgctgaggcactgggagctggctctccttctggcaggctctaaatgagcagggccacagacccacagtccagccccatggggctctgcaggcctagaggtagagggcctgctagaaacagaaggctaaacaaaaggctggcctgctcaccctcaccggagtccctcttcctaggaaaactgccttatttggaagacaaaagctcatttgttgtctcatccccacccaggagagaaggggccactccccgaagattcctcttgtttccacatagagattcctcacctggtacatagcatatattgggcttttatttgatcatcactgctcactttaagagcaggctttcgatctgtgagcccgcggagtatgcaccatgagcaaagctcaccctcccgagctgaaaaaatttatggacaagaagttatcattgaaattaaatggtggcagacatgtccaaggaatattgcggggatttgatccctttatgaaccttgtgatagatgaatgtgtggaaatggcgactagtggacaacagaacaatattggaatggtggtaatatgaggaaatagtatcatcatgttagaagccttggaatgagtataaataatggctggtcagcagagaaacccatgctctctctccataggtcctgttttactatgatgtaaaaattaggtcatgtacattttcatattagactttttgttaaataaacttttgtaatagtcaaaaatgctttctcagatgttctgaatatagaatatcagctctcattccagtttttttctaacangaattttcctggttgacattgatttcaaagggttttatgc

SEQ ID NO: 259 - DNA, 2716 bp, Homo sapiens
  misc_feature: Incyte ID No: 2508261
  unsure 966: a, t, c, g, or other
ggcaatagcagaataggagcaagccagcactagtcagctaactaagtgactcaaccaaggccttttttccttgttatctttgcagatacttcattttcttagcgtttctggagattacaacatcctgcggttccgtttctgggaactttactgatttatctcccccctcacacaaataagcattgattcctgcatttctgaagatctcaagatctggactactgttgaaaaaatttccagtgaggctcacttatgtctgtaaagatgggaaaaaaatacaagaacattgttctactaaaaggattagaggtcatcaatgattatcattttagaatggttaagtccttactgagcaacgatttaaaacttaatttaaaaatgagagaagagtatgacaaaattcagattgctgacttgatggaagaaaagttccgaggtgatgctggtttgggcaaactaataaaaattttcgaagatataccaacgcttgaagacctggctgaaactcttaaaaaagacaagttaaaagtaaaaggaccagccctatcaagaaagaggaagaaggaagtggatgctacttcacctgcaccctccacaagcagcactgtcaaaactgaaggagcagaggcaactcctggagctcagaacccgaaaacagtggccaaatgtcaggtaactcccagaagaaatgttctccaaaaacgcccagtgatagtgaaggtactgagtacaacaaagccatttgaatatgagaccccagaaatggagaaaaaaataatgtttcatgctacagtggctacacagacacagttcttccatgtgaaggttttaaacaccagcttgaaggagaaattcaatggaaagaaaatcatcatcatatcagattatttggaatatgatagtctcctagaggtcaatgaagaatctactgtatctgaagctggtcctaaccaaacgtttgagggntccaaataaaatcatcaacagagcaaaggaaactctgaagattgatattcttcacaaacaagcttcaggaaatattgtatatggggtatttatgctacataagaaaacagtaaatcagaagaccacaatctacgaaattcaggatgatagaggaaaaatggatgtagtggggacaggacaatgtcacaatatcccctgtgaagaaggagataagctccaacttttctgctttcgacttagaaaaaagaaccagatgtcaaaactgatttcagaaatgcatagttttatccagataaagaaaaaaacaaacccgagaaacaatgaccccaagagcatgaagctaccccagggaacagagtcagcttccaaatccttcagaggccagcacaaccttccctgagagccatcttcggactcctcagatgccaccaacaactccatccagcagtttcttcaccaagaaaagtgaagacacaatctccaaaatgaatgacttcatgaggatgcagatactgaaggaagggagtcattttccaggaccgttcatgaccagcataggcccagctgagagccatccccacactcctcagatgcctccatcaacaccaagcagcagtttcttaaccacggtacaaaaaagtgaagacacaatctccaaaatgaatgacttcatgaggatgcagatactgaaggaagggagtcattttccaggaccgttcatgaccagcataggcccagctgagagccatccccacactcctcagatgcctccatcaacaccaagcagcagtttcttaaccacgttgaaaccaagactgaagactgaacctgaagaagtttccatagaagacagtgcccagagtgacctcaaagaagtgatggtgctgaacgcaacagaatcatttgtatatgagcccaaagagcagaagaaaatgtttcatgccacagtggcaactgagaatgaagtcttccgagtgaaggtttttaatattgacctaaaggagaagttcaccccaaagaagatcattgccatagcaaattatgtttgccgcaatgggttcctggaggtatatcctttcacacttgtggctgatgtgaatgctgaccgaaacatggagatcccaaaaggattgattagaagtgccagcgtaactcctaaaatcaatcagctttgctcacaaactaaaggaagttttgtgaatggggtgtttgaggtacataagaaaaatgtaaggggtgaattcacttattatgaaatacaagataatacagggaagatggaagtggtggtgcatggacgactgaccacaatcaactgtgaggaaggagataaactgaaactcacctgctttgaattggcaccgaaaagtgggaataccggggagttgagatctgtaattcatagtcacatcaaggtcatcaagaccaggaaaaacaagaaagacatactcaatcctgattcaagtatggaaacttcaccagactttttcttctaaaatctggatgtcattgacgataatgtttatggagataaggtctaagtgcctaaaaaaatgtacatatacctggttgaaatacaacactatacatacacaccaccatatatactagctgttaatcctatggaatggggtattgggagtgcttttttaatttttcatagtttttttttaataaaatggcatattttgcatctacaacttctataatttgaaaaaataaataaacattatcttttttgtgaaaaaaa

SEQ ID NO: 260 - DNA, 2882 bp, Homo sapiens
  misc_feature: Incyte ID No: 232945.12
gaattcgggcagattagaccctggtcctacactcttagccgctgcctgcttttgacctttggctcatgggtacttgacgttttaaactcctaggcccaggatgaggaggagcttggctcccagccagctggccaagagaaaacctgaaggcaggtcctgtgatgatgaagactggcaacctggcctagtgactcctaggaaacggaaatccagcagtgagacccagatccaggagtgtttcctgtctccttttcggaaacctttgagtcagctaaccaatcaaccaccttgtctggacagcagtcagcatgaagcatttattcgaagcattttgtcaaagcctttcaaagtccccattccaaattatcaaggtcctctgggctctcgagcattgggcctgaaaagggctggggtccgccgggccctccatgaccccctggaaaaagatgccttggttctgtatgagcctcccccgctgagcgctcatgaccagctgaagcttgacaaggagaaactccctgtccatgtggttgttgaccctattctcagtaaggttttgcggcctcatcagagagagggagtgaaattcctgtgggagtgtgtcaccagtcggcgcatccctggcagccatggctgcatcatggctgatgagatgggcctaggaaagacgctgcagtgcatcacattgatgtggacacttttacgccagagtccagagtgcaagccagaaattgacaaggcagtggtggtgtcgccttccagcctggtgaagaactggtacaatgaggttgggaaatggctcggagggaggatccaacctctggccatcgatggaggatctaaggatgaaatagaccaaaagctggaaggattcatgaaccagcgtggagccagggtgtcttctcccatcctcatcatttcctatgagaccttccgccttcatgttggagtcctccagaaaggaagtgttggtctggtcatatgtgacgagggacacaggctcaagaactctgagaatcagacttaccaagccctggacagcttgaacaccagccggcgggtgctcatctccggaactcccatccagaatgatctgcttgagtatttcagcttggtacattttgttaattccggcatcctagggactgcccatgaattcaagaagcattttgaattgccaattttgaagggtcgagacgctgctgctagtgaggcagacaggcagctaggagaggagcggctgcgggagctcaccagcattgtgaatagatgcctgatacggaggacttctgatatcctttctaaatatctgcctgtgaagattgagcaggtcgtttgttgtaggctgacaccccttcagactgagttatacaagaggtttctgagacaagccaaaccggcagaagaattgcttgagggcaagatgagtgtgtcttccctttcttccatcacctcgctaaagaagctttgtaatcatccagctctaatctatgataagtgtgtggaagaggaggatggctttgtgggtgccttggacctcttccctcctggttacagctctaaggccctggagccccagctgtcaggtaagatgctggtcctggattatattctggcggtgacccgaagccgtagcagtgacaaagtagtgctggtgtcgaattacacccagactttggatctctttgagaagctgtgccgtgcccgaaggtacttatacgtccgcctggatggcacgatgtccattaagaagcgagccaaggttgtagaacgcttcaatagtccatcgagccctgactttgtcttcatgctgagcagcaaagctgggggctgtggcctcaatctcattggggctaaccggctggtcatgtttgaccctgactggaacccagccaatgatgaacaagccatggcccgggtctggcgagatggtcaaaagaagacttgctatatctaccgcctgctgtctgcagggaccattgaggagaagatcttccagcgtcagagccacaagaaggcactgagccagctgtgtggtggatgaggagcaggatgtagagcgccacttctctctgggcgagttgaaggagctgtttatcctggatgaagctagcctcagtgacacacatgacaggttgcactgccgacgttgtgtcaacagccgtcagatccggccaccccctgatggttctgactgcacttcagacctggcagggtggaaccactgcactgataagtgggggctccgggatgaggtactccaggctgcctgggatgctgcctccactgctatcaccttcgtcttccaccagcgttctcatgaggagcagcggggcctccgctgataaccagctggtctgggtgtagctcttagaggaaggagatagggaaaaggggctccttgctccacagggccctgttgaattttgttctctgggagaaaatcatcaagaagggctgcatgatgtttgcccaaaatttattttataagaaaaacttttttggttaaaaaaaagaataaaggtatgaaagggtttgaggcctgagagcagtgtggtaagcccagcagggaagaagccccctatacttctctaaagcctgggtgcctgcttgaggagggaaggcaggaacccaggggcaggggaggggatctcttcagcaattatgatgaccactgtaacctcccctgcccctgggttcctgccttccctcctcaagcaggcacccaggctttagagaagtataggggggcttcttccctgctgggcttaccacactgctctcaggcctcaaaccctttcatacctttattcttttttttaaccaaaaaagtttttcttataaaataaattttgggcaaacatcaaaaaaaaaaaaaaagg

SEQ ID NO: 261 - DNA, 1335 bp, Homo sapiens
  misc_feature: Incyte ID No: 445101.8
gtcgcaacgcggcgcagggtgagagcgcgcgcttgcggacgcggcggcattaaacggttgcaggcgtagcagagtggtcgttgtctttctaggtctcagccggtcgtcgcgacgttcgcccgctcgctctgaggctcctgaagccgaaaccagctagactttcctccttcccgcctgcctgtagcggcgttgttgccactccgccaccatgttcgaggcgcgcctggtccagggctccatcctcaagaaggtgttggaggcactcaaggacctcatcaacgaggcctgctgggatattagctccagcggtgtaaacctgcagagcatggactcgtcccacgtctctttggtgcagctcaccctgcggtctgagggcttcgacacctaccgctgcgaccgcaacctggccatgggcgtgaacctcaccagtatgtccaaaatactaaaatgcgccggcaatgaagatatcattacactaagggccgaagataacgcggataccttgggcgctagtatttgaagcaccaaaccaggagaaagtttcagactatgaaatgaagttgatggatttagatgttgaacaacttggaattccagaacaggagtacagctgtgtagtaaagatgccttctggtgaatttgcacgtatatgccgagatctcagccatattggagatgctgttgtaatttcctgtgcaaaagacggagtgaaattttctgcaagtggagaacttggaaatggaaacattaaattgtcacagacaagtaatgtcgataaagaggaggaagctgttaccatagagatgaatgaaccagttcaactaacttttgcactgaggtacctgaacttctttacaaaagccactccactctcttcaacggtgacactcagtatgtctgcagatgtaccccttgttgtagagtataaaattgcggatatgggacacttaaaatactacttggctcccaagatcgaggatgaagaaggatcttaggcattcttaaaattcaagaaaataaaactaagctctttgagaactgcttctaagatgccagcatatactgaagtcttttctgtcaccaaatttgtacctctaagtacatatgtagatattgttttctgtaaataacctatttttttctctattctctgcaatttgtttaaagaataaagtccaaagtcagatctggtctagttaacctagaagtatttttgtctcttagaaatacttgtgatttttataatacaaaagggtcttgactctaaatgcagttttaagaattgtttttgaatttaaataaagttacttgaatttcaaacatcaaaaaaaaaaa

SEQ ID NO: 262 - DNA, 531 bp, Homo sapiens
  misc_feature: Incyte ID No: 255750.1
cgcacaaacggaaagagcgggcgcggtgcgcaggggcgggcgcccagcgggcttggcatgcgcgcccccgcccgaggctataaaagcatcgccacctgctgccactagccaagccgcgcgtccagttgcttggagaagcccgttcaccgcctccagctgctgctctcctcgacatggaccctgagacctgcccctgcccttctggtggctcctgcacctgcgcggactcctgcaagtgcgagggatgcaaatgcacctcctgcaagaagagctgctgctcctgctgccctgcggagtgtgagaagtgtgccaaggactgtgtgtgcaaaggcggagaggcagctgaggcagaagcagagaagtgcagctgctgccagtgagaaggcacccctccgtgtggagcacgtggagatagtgccaggtggctcagtgccacctatgcctgtggtgaagtgtggctggtgtccccttcccctgctgaccttggaggaatgacaataaatcccatgaacagcaaaaaaaaaaaaaagg

SEQ ID NO: 263 - DNA, 1095 bp, Homo sapiens
  misc_feature: Incyte ID No: 988231.7
ccccaaacccgcacagagcaggactgcagcctgaggaaagagcaaggatttcaggagagaggcctgcgacaagtgaggtgagggcttttgggggattgtcctggcgcctggagtgtgggggcctggcaggggccctgaacggggacagtgaggtcctgtacttgctggcctggggtggacagaacccaagcctgggtaaaatccccagggccccctaaacccaacacttaggaagtcactagtcctgacttgagtttctgatgaggaagcctctctccttagccttcagcctttcctcccaccctgccataaagtaatttgatcctcaagaagttaaaccacacctcattggtccctggctaattcaccaatttacaaacagcaggaaatagaaacttaagagaaatacacacttctgagaaactgaaacgacaggggaaaggaggtctcactgagcaccgtcccagcatccggacaccacagcggcccttcgctccacgcagaaaaccacacttctcaaaccttcactcaacacttccttccccaaagccagaagatgcacaaggaggaacatgaggtggctgtgctgggggcaccccccagcaccatccttccaaggtccaccgtgatcaacatccacagcgagacctccgtgcccgaccatgtcgtctggtccctgttcaacaccctcttcttgaactggtgctgtctgggcttcatagcattcgcctactccgtgaagtctagggacaggaagatggttggcgacgtgaccggggcccaggcctatgcctccaccgccaagtgcctgaacatctgggccctgattctgggcatcctcatgaccattggattcatcctgttactggtattcggctctgtgacagtctaccatattatgttacagataatacaggaaaaacggggttactagtagccgcccatagcctgcaacctttgcactccactgtgcaatgctggccctgcacgctggggctgttgcccctgcccccttggtcctgcccctagatacagcagtttatacccacacacctgtctacagtgtcattcaataaagtgcacgtgcttgtgaaa

SEQ ID NO: 264 - DNA, 695 bp, Homo sapiens
  misc_feature: Incyte ID No: 444902.6
ggaaaaggaaactgttgagaaaccgaaactactggggaaagggagggctcactgagaaccatcccagtaacccgaccgccgctggtcttcgctggacaccatgaatcacactgtccaaaccttcttctctcctgtcaacagtggccagccccccaactatgagatgctcaaggaggagcacgaggtggctgtgctgggggcgccccacaaccctgctcccccgacgtccaccgtgatccacatccgcagcgagacctccgtgcccgaccatgtcgtctggtccctgttcaacaccctcttcatgaacccctgctgcctgggcttcatagcattcgcctactccgtgaagtctagggacaggaagatggttggcgacgtgaccggggcccaggcctatgcctccaccgccaagtgcctgaacatctgggccctgattctgggcatcctcatgaccattctgctcatcgtcatcccagtgctgatcttccaggcctatggatagatcaggaggcatcactgaggccaggagctctgcccatgacctgtatcccacgtactccaacttccattcctcgccctgcccccggagccgagtcctgtatcagccctttatcctcacacgcttttctacaatggcattcaataaagtgcacgtgtttctggaaaataaaaaaaaaaaaagggcggtcgccgat

SEQ ID NO: 265 - DNA, 1924 bp, Homo sapiens
  misc_feature: Incyte ID No: 407546.8
  unsure 1507, 1509, 1515: a, t, c, g, or other
tccgtccgtactgcagagccgctgccggagggtcgttttaaagggcccgcgcgttgccgccccctcggcccgccatgctgctatccgtgccgctgctgctcggcctcctcggcctggccgtcgccgagcctgccgtctacttcaaggagcagtttctggacggagacgggtggacttcccgctggatcgaatccaaacacaagtcagattttggcaaattcgttctcagttccggcaagttctacggtgacgaggagaaagataaaggtttgcagacaagccaggatgcacgcttttatgctctgtcggccagtttcgagcctttcagcaacaaaggccagacgctggtggtgcagttcacggtgaaacatgagcagaacatcgactgtgggggcggctatgtgaagctgtttcctaatagtttggaccagacagacatgcacggagactcagaatacaacatcatgtttggtcccgacatctgtggccctggcaccaagaaggttcatgtcatcttcaactacaagggcaagaacgtgctgatcaacaaggacatccgttgcaaggatgatgagtttacacacctgtacacactgattgtgcggccagacaacacctatgaggtgaagattgacaacagccaggtggagtccggctccttggaagacgattgggacttcctgccacccaagaagataaaggatcctgatgcttcaaaaccggaagactgggatgagcgggccaagatcgatgatcccacagactccaagcctgaggactgggacaagcccgagcatatccctgaccctgatgctaagaagcccgaggactgggatgaagagatggacggagagtgggaacccccagtgattcagaaccctgagtacaagggtgagtggaagccccggcagatcgacaacccagattacaagggcacttggatccacccagaaattgacaaccccgagtattctcccgatcccagtatctatgcctatgataactttggcgtgctgggcctggacctctggcaggtcaagtctggcaccatctttgacaacttcctcatcaccaacgatgaggcatacgctgaggagtttggcaacgagacgtggggcgtaacaaaggcagcagagaaacaaatgaaggacaaacaggacgaggagcagaggcttaaggaggaggaagaagacaagaaacgcaaagaggaggaggaggcagaggacaaggaggatgatgaggacaaagatgaggatgaggaggatgaggaggacaaggaggaagatgaggaggaagatgtccccggccaggccaaggacgagctgtagagaggcctgcctccagggctggactgaggcctgagcgctcctgccgcagagcttgccgcgccaaataatgtctctgtgagactcgagaactttcatttttttccaggctggttcggatttggggtggattttggttttgttcccctcctccactctcccccaccccctccccgcccttntntttttntttttttaaactggtattttatctttgattctccttcagccctcacccctggttctcatctttcttgatcaacatcttttcttgcctctgtccccttctctcatctcttagctcccctccaacctggggggcagtggtgtggagaagccacaggcctgagatttcatctgctctccttcctggagcccagaggagggcagcagaagggggtggtgtctccaaccccccagcactgaggaagaacggggctcttctcatttcacccctccctttctcccctgcccccaggactgggccacttctgggtggggcagtgggtcccagattggctcacactgagaatgtaagaactacaaacaaaatttctattaaattaaattttgtgtctccaaaaaaaaaaaaaaagcgg

SEQ ID NO: 266 - DNA, 4537 bp, Homo sapiens
  misc_feature: Incyte ID No: 346511.4
  unsure 2849-2944: a, t, c, g, or other
cggcagccagctgagagcaatgggaaatggggagtcccagctgtcctcggtgcctgctcagaagctgggttggtttatccaggaatacctgaagccctacgaagaatgtcagacactgatcgacgagatggtgaacaccatctgtgacgtcctgcaggaacccgaacagttccccctggtgcagggagtggccataggtggctcctatggacggaaaacagtcttaagaggcaactccgatggtacccttgtcctcttcttcagtgacttaaaacaattccaggatcagaagagaagccaacgtgacatcctcgataaaactggggataagctgaagttctgtctgttcacgaagtggttgaaaaacaatttcgagatccagaagtcccttgatgggttcaccatccaggtgttcacaaaaaatcagagaatctctttcgaggtgctggccgccttcaacgctctgagcttaaatgataatcccagcccctggatctatcgagagctcaaaagatccttggataagacaaatgccagtcctggtgagtttgcagtctgcttcactgaactccagcagaagttttttgacaaccgtcctggaaaactaaaggatttgatcctcttgataaagcactggcatcaacagtgccagaaaaaaatcaaggatttaccctcgctgtctccgtatgccctggagctgcttacggtgtatgcctgggaacaggggtgcagaaaagacaactttgacattgctgaaggcgtcagaaccgtactggagctgatcaaatgccaggagaagctgtgtatctattggatggtcaactacaactttgaagatgagaccatcaggaacatcctgctgcaccagctccaatcagcgaggccagtaatcttggatccagttgacccaaccaataatgtgagtggagataaaatatgctggcaatggctgaaaaaagaagctcaaacctggttgacttctcccaacctgggataatgagttacctgcaccatcttggaatgttctgcctgcaccactcttcacgaccccaggccaccttctggataagttcatcaaggagtttctccagcccaacaaatgcttcctagagcagattgacagtgctgttaacatcatccgtacattccttaaagaaaactgcttccgacaatcaacagccaagatccagattgtccggggaggatcaaccgccaaaggcacagctctgaagactggctctgatgccgatctcgtcgtgttccataactcacttaaaagctacacctcccaaaaaaacgagcggcacaaaatcgtcaaggaaatccatgaacagctgaaagccttttggagggagaaggaggaggagcttgaagtcagctttgagcctcccaagtggaaggctcccagggtgctgagcttctctctgaaatccaaagtcctcaacgaaagtgtcagctttgatgtgcttcctgcctttaatgcactgggtcagctgagttctggctccacacccagccccgaggtttatgcagggctcattgatctgtataaatcctcggacctcccgggaggagagttttctacctgtttcacagtcctgcagcgaaacttcattcgctcccggcccaccaaactaaaggatttaattcgcctggtgaagcactggtacaaagagtgtgaaaggaaactgaagccaaaggggtctttgcccccaaagtatgccttggagctgctcaccatctatgcctgggagcaggggagtggagtgccggattttgacactgcagaaggtttccggacagtcctggagctggtcacacaatatcagcagctctgcatcttctggaaggtcaattacaactttgaagatgagaccgtgaggaagtttctactgagccagttgcagaaaaccaggcctgtgatcttggacccagccgaacccacaggtgacgtgggtggaggggaccgttggtgttggcatcttctggcaaaagaagcaaaggaatggttatcctctccctgcttcaaggatgggactggaaacccaataccaccttggaaagtgccggtaaaagtcatctaaaggaggcgttgtctggaaatagccctgtaacaggcttgaatcaaagaacttctcctactgtagcaacctgaaattaactcagacacaaataaaggaaacccagctcacaggagcttaaacagctggtcagccccctaagcccccactacaagtgatcctcaggcaggtaaccccagattcatgcactgtagggtgctgcgcagcatccctagtctctacccagtagatgccactagccctcctctcccagtgacaaccaaaagtcttcagacattgtcaaacgttcccctgggttcacagatctttctgcctttggcttttggctccaccctctttagctgttaatttgagtacttatggccctgaaagcggccacggtgcctccagatggcaggtttgcaatccaagcaggaagaaggaaaagatacccaaaggtcaagaacacagtgattttattagaagtttcatccgcaaattttcttccatttcattgctcagaaatgtcatgtggttacctgtaacttgaaggtggctacaaagatgactgtggacgtgggttgcactggccacccaaggatgtctgccacacctctccaaagccctccctacctaccaagatatacctgatatattccaccaggatatcctccctccagatatacttggttctctccaccaggttctttctttaaagcaggattctcaactttgatacttactcacattgggctagacagttctttgtttggaggctctcttgtgcannnnnnnnnnnnnnnnnnnnnnnnnnnnnnnnnnnnnnnnnnnnnnnnnnnnnnnnnnnnnnnnnnnnnnnnnnnnnnnnnnnnnnnnnnnnnnnnccctaggtgagaacccttgcactagaggaaccctacaccccaaccctggggggaatgtagggaagaggtggccaagccaaccgtggggttagctctaattattaagatatgcattataaataaataccaaaaaattgtctctggcaatagttaccttcccagatacaggtccccccttttttcccctaactcttttaagcaatgattgtaactattaggagacattgctctcccacgtatgtttttctttttagacaatgcagacaccaggaagttgtggagctaggatccatcctattgtcaatgagatgttctcatccagaagccatagaatcctgaataataattctaaaagaaacttctggagatcatctggcaatcgcttttaaagactcggctcaccgtgagaaagagtcactcacatccattcttcccttgatggtccctattcctccttcccttgcttcttggacttcttgaaatcaatcaagactgcaaaccctttcataaagtcttgccttgctgaactccctctctgcaggcagcctgcctttaaaaatagttgctgtcatccactttatgtgcatcttatttctgtcaacttgtattttttttcttgtatttttccaattagctcctcctttttccttccagtctaaaaaaggaatcctctgtgtcttcaaagcaaagctctttactttccccttggttctcataactctgtgatattgctctcggtgcttccaactcatccacgtcctgtctgtttcctctgtatacaaaaccctttctgcccctgctgacacagacatcctctatgccagcagccagccaaccctttcattagaacttcaagctctccaaaggctcagattataactgttgtcatatttatatgaggctgttgtcttttccttctgagcctgcctttctccccccacccaggagtatcctcttgccaaatcaaaagactttttccttgggctttagccttaaagatacttgaaggtctaggtgctttaacctcacataccctcacttaaacttttatcactgttgcatataccagttgtgatacaataaagaatgtatctggattttgtgcctagttcctagcacacagcttcaaaaattctagagtttcctgataggagtgtcttttgtattcataacaagcccttttcacccatgcctgggtttatgctaacaaggttacccatggtgggcccttagtttcaaggaaggagttggccaagccagaaagaccaagcatgtggttaaagcattggaattttcagccccatcccacccccaatctccaaggaggtgatggggctggaaattgagttcaattttaacatggccagtgatttaagcaatgctgcctatgtaaagaaaccccaataaaaactctggacagtgaggcttggggagcttcctgattggcagacattccaatgtactaggaaggtagcgcatcttgattccacagggacaaaggctcctgagctctgggcccttccagtgcttgccaccctacatactctttgtctggctcttcatttgtattctttataataaaatggtgattgt

SEQ ID NO: 267 - DNA, 3199 bp, Homo sapiens
  misc_feature: Incyte ID No: 346511.5
gtttcctggctctgggcagcagcaagaattcctctgcctcccatcctaccattcactgtcttgccggcagccagctgagagcaatgggaaatggggagtcccagctgtcctcggtgcctgctcagaagctgggttggtttatccaggaatacctgaagccctacgaagaatgtcagacactgatcgacgagatggtgaacaccatctgtgacgtcctgcaggaacccgaacagttccccctggtgcagggagtggccataggtggctcctatggacggaaaacagtcttaagaggcaactccgatggtacccttgtcctcttcttcagtgacttaaaacaattccaggatcagaagagaagccaacgtgacatcctcgataaaactggggataagctgaagttctgtctgttcacgaagtggttgaaaaacaatttcgagatccagaagtcccttgatgggttcaccatccaggtgttcacaaaaaatcagagaatctctttcgaggtgctggccgccttcaacgctctgagcttaaatgataatcccagcccctggatctatcgagagctcaaaagatccttggataagacaaatgccagtcctggtgagtttgcagtctgcttcactgaactccagcagaagttttttgacaaccgtcctggaaaactaaaggatttgatcctcttgataaagcactggcatcaacagtgccagaaaaaaatcaaggatttaccctcgctgtctccgtatgccctggagctgcttacggtgtatgcctgggaacaggggtgcagaaaagacaactttgacattgctgaaggcgtcagaaccgtactggagctgatcaaatgccaggagaagctgtgtatctattggatggtcaactacaactttgaagatgagaccatcaggaacatcctgctgcaccagctccaatcagcgaggccagtaatcttggatccagttgacccaaccaataatgtgagtggagataaaatatgctggcaatggctgaaaaaagaagctcaaacctggttgacttctcccaacctggataatgagttacctgcaccatcttggaatgttctgcctgcaccactcttcacgaccccaggccaccttctggataagttcatcaaggagtttctccagcccaacaaatgcttcctagagcagattgacagtgctgttaacatcatccgtacattccttaaagaaaactgcttccgacaatcaacagccaagatccagattgtccggggaggatcaaccgccaaaggcacagctctgaagactggctctgatgccgatctcgtcgtgttccataactcacttaaaagctacacctcccaaaaaaacgagcggcacaaaatcgtcaaggaaatccatgaacagctgaaagccttttggagggagaaggaggaggagcttgaagtcagctttgagcctcccaagtggaaggctcccagggtgctgagcttctctctgaaatccaaagtcctcaacgaaagtgtcagctttgatgtgcttcctgcctttaatgcactgggtcagctgagttctggctccacacccagccccgaggtttatgcagggctcattgatctgtataaatcctcggacctcccgggaggagagttttctacctgtttcacagtcctgcagcgaaacttcattcgctcccggcccaccaaactaaaggatttaattcgcctggtgaagcactggtacaaagagtgtgaaaggaaactgaagccaaaggggtctttgcccccaaagtatgccttggagctgctcaccatctatgcctgggagcaggggagtggagtgccggattttgacactgcagaaggtttccggacagtcctggagctggtcacacaatatcagcagctctgcatcttctggaaggtcaattacaactttgaagatgagaccgtgaggaagtttctactgagccagttgcagaaaaccaggcctgtgatcttggacccagccgaacccacaggtgacgtgggtggaggggaccgttggtgttggcatcttctggcaaaagaagcaaaggaatggttatcctctccctgcttcaaggatgggactggaaacccaataccaccttggaaagtgccgacaatgcagacaccaggaagttgtggagctaggatccatcctattgtcaatgagatgttctcatccagaagccatagaatcctgaataataattctaaaagaaacttctggagatcatctggcaatcgcttttaaagactcggctcaccgtgagaaagagtcactcacatccattcttcccttgatggtccctattcctccttcccttgccttcttggacttcttgaaatcaatcaagactgcaaaccctttcataaagctgccttgctgaactcctctctgcaggagccctgcttaaaatagttgatgtcatcactttatgtgcatcttatttctgtcaacttgtattttttttcttgtatttttccaattagctcctcctttttccttccagtctaaaaaaggaatcctctgtgtcttcaaagcaaagctctttactttccccttggttctcataactctgtgatcttgctctcggtgcttccaactcatccacgtcctgtctgtttcctctgtatacaaaaccctttctgcccctgctgacacagacatcctctatgccagcagccagccaaccctttcattagaacttcaagctctccaaaggctcagattataactgttgtcatatttatatgaggctgttgtcttttccttctgagcctgcctttctccccccacccaggagtatcctcttgccaaatcaaaagactttttccttgggctttagccttaaagatacttgaaggtctaggtgctttaacctcacataccctcacttaaacttttatcactgttgcatataccagttgtgatacaataaagaatgtatctggattttgtgcctagttcctagcacacagcttcaaaaattctagagtttcctgataggagtgtcttttgtattcataacaagcccttttcacccatccctgggtttatgctaacaaggttacccatggtgggcccttagtttcaaggaaggagttggccaagccagaaagaccaagcatgtggttaaagcatggaattttcagccccatcccacccccaatctccaaggaggt

SEQ ID NO: 268 - DNA, 5709 bp, Homo sapiens
  misc_feature: Incyte ID No: 1098141.1
agctcgctgagacttcctggaccccgcaccaggctgtggggtttctcagataactgggcccctgcgctcaggaggccttcaccctctgctctgggtaaagttcattggaacagaaagaaatggatttatctgctcttcgcgttgaagaagtacaaaatgtcattaatgctatgcagaaaatcttagagtgtcccatctgtctggagttgatcaaggaacctgtctccacaaagtgtgaccacatattttgcaaattttgcatgctgaaacttctcaaccagaagaaagggccttcacagtgtcctttatgtaagaatgatataaccaaaaggagcctacaagaaagtacgagatttagtcaacttgttgaagagctattgaaaatcatttgtgcttttcagcttgacacaggtttggagtatgcaaacagctataattttgcaaaaaaggaaaataactctcctgaacatctaaaagatgaagtttctatcatccaaagtatgggctacagaaaccgtgccaaaagacttctacagagtgaacccgaaaatccttccttgcaggaaaccagtctcagtgtccaactctctaaccttggaactgtgagaactctgaggacaaagcagcggatacaacctcaaaagacgtctgtctacattgaattgggatctgattcttctgaagataccgttaataaggcaacttattgcagtgtgggagatcaagaattgttacaaatcacccctcaaggaaccagggatgaaatcagtttggattctgcaaaaaaggctgcttgtgaattttctgagacggatgtaacaaatactgaacatcatcaacccagtaataatgatttgaacaccactgagaagcgtgcagctgagaggcatccagaaaagtatcagggtagttctgtttcaaacttgcatgtggagccatgtggcacaaatactcatgccagctcattacagcatgagaacagcagtttattactcactaaagacagaatgaatgtagaaaaggctgaattctgtaataaaagcaaacagcctggcttagcaaggagccaacataacagatgggctggaagtaaggaaacatgtaatgataggcggactcccagcacagaaaaaaaggtagatctgaatgctgatcccctgtgtgagagaaaagaatggaataagcagaaactgccatgctcagagaatcctagagatactgaagatgttccttggataacactaaatagcagcattcagaaagttaatgagtggttttccagaagtgatgaactgttaggttctgatgactcacatgatggggagtctgaatcaaatgccaaagtagctgatgtattggacgttctaaatgaggtagatgaatattctggttcttcagagaaaatagacttactggccagtgatcctcatgaggctttaatatgtaaaagtgaaagagttcactccaaatcagtagagagtaatattgaagacaaaatatttgggaaaacctatcggaagaaggcaagcctccccaacttaagccatgtaactgaaaatctaattataggagcatttgttactgagccacagataatacaagagcgtcccctcacaaataaattaaagcgtaaaaggagacctacatcaggccttcatcctgaggattttatcaagaaagcagatttggcagttcaaaagactcctgaaatgataaatcagggaactaaccaaacggagcagaatggtcaagtgatgaatattactaatagtggtcatgagaataaaacaaaaggtgattctattcagaatgagaaaaatcctaacccaatagaatcactcgaaaaagaatctgctttcaaaacgaaagctgaacctataagcagcagtataagcaatatggaactcgaattaaatatccacaattcaaaagcacctaaaaagaataggctgaggaggaagtcttctaccaggcatattcatgcgcttgaactagtagtcagtagaaatctaagcccacctaattgtactgaattgcaaattgatagttgttctagcagtgaagagataaagaaaaaaaagtacaaccaaatgccagtcaggcacagcagaaacctacaactcatggaaggtaaagaacctgcaactggagccaagaagagtaacaagccaaatgaacagacaagtaaaagacatgacagcgatactttcccagagctgaagttaacaaatgcacctggttcttttactaagtgttcaaataccagtgaacttaaagaatttgtcaatcctagccttccaagagaagaaaaagaagagaaactagaaacagttaaagtgtctaataatgctgaagaccccaaagatctcatgttaagtggagaaagggttttgcaaactgaaagatctgtagagagtagcagtatttcattggtacctggtactgattatggcactcaggaaagtatctcgttactggaagttagcactctagggaaggcaaaaacagaaccaaataaatgtgtgagtcagtgtgcagcatttgaaaaccccaagggactaattcatggttgttccaaagataatagaaatgacacagaaggctttaagtatccattgggacatgaagttaaccacagtcgggaaacaagcatagaaatggaagaaagtgaacttgatgctcagtatttgcagaatacattcaaggtttcaaagcgccagtcatttgctccgttttcaaatccaggaaatgcagaagaggaatgtgcaacattctctgcccactctgggtccttaaagaaacaaagtccaaaagtcacttttgaatgtgaacaaaaggaagaaaatcaaggaaagaatgagtctaatatcaagcctgtacagacagttaatatcactgcaggctttcctgtggttggtcagaaagataagccagttgataatgccaaatgtagtatcaaaggaggctctaggttttgtctatcatctcagttcagaggcaacgaaactggactcattactccaaataaacatggacttttacaaaacccatatcgtataccaccactttttcccatcaagtcatttgttaaaactaaatgtaagaaaaatctgctagaggaaaactttgaggaacattcaatgtcacctgaaagagaaatgggaaatgagaacattccaagtacagtgagcacaattagccgtaataacattagagaaaatgtttttaaagaagccagctcaagcaatattaatgaagtaggttccagtactaatgaagtgggctccagtattaatgaaataggttccagtgatgaaaacattcaagcagaactaggtagaaacagagggccaaaattgaatgctatgcttagattaggggttttgcaacctgaggtctataaacaaagtcttcctggaagtaattgtaagcatcctgaaataaaaaagcaagaatatgaagaagtagttcagactgttaatacagatttctctccatatctgatttcagataacttagaacagcctatgggaagtagtcatgcatctcaggtttgttctgagacacctgatgacctgttagatgatggtgaaataaaggaagatactagttttgctgaaaatgacattaaggaaagttctgctgtttttagcaaaagcgtccagaaaggagagcttagcaggagtcctagccctttcacccatacacatttggctcagggttaccgaagaggggccaagaaattagagtcctcagaagagaacttatctagtgaggatgaagagcttccctgcttccaacacttgttatttggtaaagtaaacaatataccttctcagtctactaggcatagcaccgttgctaccgagtgtctgtctaagaacacagaggagaatttattatcattgaagaatagcttaaatgactgcagtaaccaggtaatattggcaaaggcatctcaggaacatcaccttagtgaggaaacaaaatgttctgctagcttgttttcttcacagtgcagtgaattggaagacttgactgcaaatacaaacacccaggatcctttcttgattggttcttccaaacaaatgaggcatcagtctgaaagccagggagttggtctgagtgacaaggaattggtttcagatgatgaagaaagaggaacgggcttggaagaaaataatcaagaagagcaaagcatggattcaaacttaggtgaagcagcatctgggtgtgagagtgaaacaagcgtctctgaagactgctcagggctatcctctcagagtgacattttaaccactcagagggataccatgcaacataacctgataaagctccagcaggaaatggctgaactagaagctgtgttagaacagcatgggagccagccttctaacagcttacccttccatcataagtgactcttctgcccttgaggacctgcgaaatccagaacaaagcacattcagaaaaagcagtattaacttcacagaaaagtagtgaataccctataagccagaatccagaaggcctttctgctgacaagtttgaggtgtctgcagatagttctaccagtaaaaataaagaaccaggagtggaaaggtcatccccttctaaatgcccatcattagatgataggtggtacatgcacagttgctctgggagtcttcagaatagaaactacccatctcaagaggagctcattaaggttgttgatgtggaggagcaacagctggaagagtctgggccacacgatttgacggaaacatcttacttgccaaggcaagatctagagggaaccccttacctggaatctggaatcagcctcttctctgatgaccctgaatctgatccttctgaagacagagccccagagtcagctcgtgttggcaacataccatcttcaacctctgcattgaaagttccccaattgaaagttgcagaatctgcccagagtccagctgctgctcatactactgatactgctgggtataatgcaatggaagaaagtgtgagcagggagaagccagaattgacagcttcaacagaaagggtcaacaaaagaatgtccatggtggtgtctggcctgaccccagaagaatttatgctcgtgtacaagtttgccagaaaacaccacatcactttaactaatctaattactgaagagactactcatgttgttatgaaaacagatgctgagtttgtgtgtgaacggacactgaaatattttctaggaattgcgggaggaaaatgggtagttagctatttctgggtgacccagtctattaaagaaagaaaaatgctgaatgagcatgattttgaagtcagaggagatgtggtcaatggaagaaaccaccaaggtccaaagcgagcaagagaatcccaggacagaaagatcttcagggggctagaaatctgttgctatgggcccttcaccaacatgcccacagatcaactggaatggatggtacagctgtgtggtgcttctgtggtgaaggagtttcatcattcacccttggcacaggtgtccacccaattgtggttgtgcagccagatgcctggacagaggacaatggcttccatgcaattgggcagatgtgtgaggcacctgtggtgacccgagagtgggtgttggacagtgtagcactctaccagtgccaggagctggacacctacctgataccccagatcccccacagccactactga

SEQ ID NO: 269 - DNA, 3338 bp, Homo sapiens
  misc_feature: Incyte ID No: 238089.2
gcgctgtgtaggcaagttacccgtgttctgcgttgccggccgtgggtgctctggccacagtgagttaggggcgtcggagcgggtttctccaaccgcaatcggctccgctcaaggggaggaggagagtcccttctcggaagacctaaggaaacgtgtcgtctggaatgggcttgggggccacgcctgcacatctccgcgagacagagggataaagtgaagatggtgctgttattgttacctcgagtgccacatgcgatctctgagatatgtacacagtcattcttactatcgcactcagccattcttactacgctaaagaagaaataattattcgaggatatttgcctggcccagaagaaacttatgtaaatttcatgaactattatatccgttttcctcggagtgagagaaaactctttttagatatcatctgagaggtagttaatttggcaccatggggatacagggattgctacaatttatcaaagaagcttcagaacccatccatgtgaggaagtataaagggcaggtagtagctgtggatacatattgctggcttcacaaaggagctattgcttgtgctgaaaaactagccaaaggtgaacctactgataggtatgtaggattttgtatgaaatttgtaaatatgttactatctcatgggatcaagcctattctcgtatttgatggatgtactttaccttctaaaaaggaagtagagagatctagaagagaaagacgacaagccaatcttcttaagggaaagcaacttcttcgtgaggggaaagtctcggaagctcgagagtgtttcacccggtctatcaatatcacacatgccatggcccacaaagtaattaaagctgcccggtctcagggggtagattgcctcgtggctccctatgaagctgatgcgcagttggcctatcttaacaaagcgggaattgtgcaagccataattacagaggactcggatctcctagcttttggctgtaaaaaggtaattttaaagatggaccagtttggaaatggacttgaaattgatcaagctcggctaggaatgtgcagacagcttggggatgtattcacggaagagaagtttcgttacatgtgtattctttcaggttgtgactacctgtcatcactgcgtgggattggattagcaaaggcatgcaaagtcctaagactagccaataatccagatatagtaaaggttatcaagaaaattggacattatctcaagatgaatatcacggtaccagaggattacatcaacgggtttattcgggccaacaataccttcctctatcagctagtttttgatcccatcaaaaggaaacttattcctctgaacgcctatgaagatgatgttgatcctgaaacactaagctacgctgggcaatatgttgatgattccatagctcttcaaatagcacttggaaataaagatataaatacttttgaacagatcgatgactacaatccagacactgctatgcctgcccattcaagaagtcgtagttgggatgacaaaacatgtcaaaagtcagctaatgttagcagcatttgggcataggaattactctcccagaccagagtcgggtactgtttcagatgccccacaattgaaggaaaatccaagtactgtgggagtggaacgagtgattagtactaaagggttaaatctcccaaggaaatcatccattgtgaaaagaccaagaagtgcagagctgtcagaagatgacctgttgagtcagtattctctttcatttacgaagaagaccaagaaaaatagctctgaaggcaataaatcattgagcttttctgaaatgtttgtgcctgacctggtaaatggacctactaacaaaaagagtgtaagcactccacctaggacgagaaataaatttgcaacatttttacaaaggaaaaatgaagaaagtggtgcagttgtggttccagggaccagaagcaggtttttttgcagttcagattctactgactgtgtatcaaacaaagtgagcatccagcctctggatgaaactgctgtcacagataaagagaacaatctgcatgaatcagagtatggagaccaagaaggcaagagactggttgacacagatgtagcacgtaattcaagtgatgacattccgaataatcatattccaggtgatcatattccagacaaggcaacagtgtttacagatgaagagtcctactcttttgagagcagcaaatttacaaggaccatttcaccacccactttgggaacactaagaagttgttttagttggtctggaggtcttggagatttttcaagaacgccgagcccctctccaagcacagcattgcagcagttccgaagaaagagcgattcccccacctctttgcctgagaataatatgtctgatgtgtcgcagttaaagagcgaggagtccagtgacgatgagtctcatcccttacgagaaggggcatgttcttcacagtcccaggaaagtggagaattctcactgcagagttcaaatgcatcaaagctttctcagtgctctagtaaggactctgattcagaggaatctgattgcaatattaagttacttgacagtcaaagtgaccagacctccaagctatgtttatctcatttctcaaaaaaagacacacctctaaggaacaaggttcctgggctatataagtccagttctgcagactctctttctacaaccaagatcaaacctctaggacctgccagagccagtgggctgagcaagaagccggcaagcatccagaagagaaagcatcataatgccgagaacaagccggggttacagatcaaactcaatgagctctggaaaaactttggatttaaaaaagattctgaaaagcttcctccttgtaagaaacccctgtccccagtcagagataacatccaactaactccagaagcggaagaggatatatttaacaaacctgaatgtggccgtgttcaaagagcaatattccagtaaatgcagactgctgcaaagcttttgcctgcaagagaatctgatcaatttgaagtccctgtttgggaatgaggcacttatcagcatgaagaattttttctcattctgtgccattttaaaaatagaatacattttgtatattgactttataattgggttgtggtttttttgctcagctttttatatttttataagaagctaaatagaagaataattgtatctctgacaggtttttggaggttttagtgttaattgggaaaatcctctggagtttataaaagtctactctaaatatttctgtaatgttgtcaagtagaaagatagtaaatggagaacgtacaatcc

SEQ ID NO: 270 - DNA, 1458 bp, Homo sapiens
  misc_feature: Incyte ID No: 1100105.3
  unsure 761: a, t, c, g, or other
ggcagcttcaccaaagtggggtatttccagcctttgtagctttcacttccacatctaccaagtgggcggagtggccttctgtggacgaatcagattcctctccagcaccgactttaagaggcgagccggggggtcagggtcccagatgcacaggaggagaagcaggagctgtcgggaagatcagaagccagtcatggatgaccagcgcgaccttatctccaacaatggagcaactgcccatgctgggccggcgccctggggccccggagagcaagtgcagccgcggagccctgtacacaggcttttccatcctggtgactctgctcctcgctggccaggccaccaccgcctacttcctgtaccagcagcagggccggctggacaaactgacagtcacctcccagaacctgcagctggagaacctgcgcatgaagcttcccaagcctcccaagcctgtgagcaagatgcgcatggccaccccgctgctgatgcaggcgctgcccatgggagccctgccccaggggcccatgcagaatgccaccaagtatggcaacatgacagaggaccatgtgatgcacctgctccagaatgctgaccccctgaaggtgtacccgccactgaaggggagcttcccggagaacctgagacaccttaagaacaccatggagaccatagactggaaggtctttgagagctggatggcaccattggctcctgtttgaaatgagcaggcactgccttggagcaaaagcccactggancggctccaccgaaagagtcactggaactgggaggacccgtcttctgggctgggtgtgaccaagcaggatctgggcccagtccccatgtgagagcagcagaggcggtcttcaacatcctgccagccccacacagctacagctttcttgctcccttcagcccccagcccctcccccatctcccaccctgtacctcatcccatgagaccctggtgcctggctctttcgtcacccttggacaagacaaaccaagtcggaacagcagataacaatgcagcaaggccctgctgcccaatctccatctgtcaacaggggcgtgaggtcccaggaagtggccaaaagctagacagatccccgttcctgacatcacagcagcctccaacacaaggctccaagacctaggctcatggacgagatgggaaggcacagggagaagggataaccctacacccagaccccaggctggacatgctgactgtcctctcccctccagcctttggccttggcttttctagcctatttacctgcaggctgagccactctcttccctttccccagcatcactccccaaggaagagccaatgttttccacccataatcctttctgccgacccctagttccctctgctcagccaagcttgttatcagctttcagggccatggttcacattagaataaaaggtagtaattagaaaaaaaa

SEQ ID NO: 271 - DNA, 2247 bp, Homo sapiens
  misc_feature: Incyte ID No: 474729.2
  unsure 26, 1700-1964: a, t, c, g, or other
gggacacccgtcccgaacgaaccgantgcggccccgtcccgccgcccgcccgccagccatgagctccacgcagttgcaacaagggcccctcgtacggggctgtcggccgaggtcaagaaccggctcctgtccaaatatgacccccagaaggaggcagagctccgcacctggatcgagggactcaccggcctctccatcggccccgacttccagaagggcctgaaggatggaactatcttatgcacactcatgaacaagctacagccgggctccgtccccaagatcaaccgctccatgcagaactggcaccagctagaaaacctgtccaacttcatcaaggccatggtcagctacggcatgaaccctgtggacctgttcgaggccaacgacctgtttgagagtgggaacatgacgcaggtgcaggtgtctcttctcgccctggcggggaaggccaagactaaggggctgcagagcggggtggacattggcgtcaagtactcggagaagcaggagcggaatttcgacgatgccaccatgaaggctggccagtgcgtcatcgggctgcagatgggcaccaacaaatgcgccagccagtcaggcatgactgcctacggcacgagaaggcatctctatgaccccaagaaccatatcctgccccccatggaccactcgaccatcagcctccagatgggcacgaacaagtgtgccagccaggtgggcatgacggctcccgggacccggcggcacatctatgataccaagctgggaaccgacaagtgtgacaactcctccatgtccctgcagatgggctacacgcagggcgccaaccagagcggccaggtcttcggcctggggccggcagatatatgaccccaagtactgcccgcaaggcacagtggccgatggggctccctcgggcaccggcgactgcccggacccgggggaggtccctgaatatcccccttactaccaggaggaggccggctactgaggctcccagcacgctctctccccacatcgtctccccatctgggtttttgggtttttctgtgttttcatctttttattttttttcttaacccgttcagtgctgccagtcaaccaagggtctgtgagtgtcagcgtgggatcaggcagcagagcttttttcccctttgccttgatccttcgcaaggctgagccactgggctgtgggggaaggggtcaaggccatatcccaatacgtgtagggcgagggtccctgctggcacattcaggctgtgctgggaagaagagacctgggcttggaaggaaccggtccccgacggtttctggttgcctcgcctcttcccccttttgtcagctgagcagtttgtggtttctatgcccgcaagtttcaggaagtattcacaaaagaaaaatacattttttcccccaggggtggggcaaggacagtggagagagtgctaggaaatgagtcccctgggaaaggggaccgggccgtgatgttaaatatctccggctcccaagtgactggatttgcctaggaccttcagatcaacagacttcagaccctcagacctgccccggggccaggtggagaaagtgagggccgtacaaggaagtgaaattctgagttgttggggctaagcctgaccccctctccatgctccccgccccaactcactctggcctcagtagatttttttttcagttgtggnnnnnnnnnnnnnnnnnnnnnnnnnnnnnnnnnnnnnnnnnnnnnnnnnnnnnnnnnnnnnnnnnnnnnnnnnnnnnnnnnnnnnnnnnnnnnnnnnnnnnnnnnnnnnnnnnnnnnnnnnnnnnnnnnnnnnnnnnnnnnnnnnnnnnnnnnnnnnnnnnnnnnnnnnnnnnnnnnnnnnnnnnnnnnnnnnnnnnnnnnnnnnnnnnnnnnnnnnnnnnnnnnnnnnnnnnnnnnnnnnnnnnnnnnnnnnnnnnnnnnnnnncctcagtaggttttaaggagtccccagccctcctcccttctgggcccgaccagcttatactgctccatcttccccggccacatgccccgccaagtactgcacagggaccccccacccaggggccctgctccgtgagataatgtgaaatacgactgtggaccaaacgcaataaaacctctgtttgtactgctccatcttccccggccacatgccccgccaagtactgcacagggaccccccacccaggggccctgctccgtgagataatgtgaaatacgactgt

SEQ ID NO: 272 - DNA, 6949 bp, Homo sapiens
  misc_feature: Incyte ID No: 363000.3
  unsure 2811-2812, 2814: a, t, c, g, or other
atcagggagacagggcaaaggtttcacccttcagttcagtccccaatccctgcttattatttccctaacagaagaccatcccccttgccactccctggtttttcttctctggcagcaatgaagcagctgctgacccagctctagttttcgggaagtcagatgaccttttccctcccgcggctctctacctctcgccgcccctagggaggacaccatgggcccactgatggttcttttttgcctgctgttcctgtacccaggtctggcagactcggctccctcctgccctcagaacgtgaatatctcgggtggcaccttcaccctcagccatggctgggctcctgggagccttctcacctactcctgcccccagggcctgtacccatccccagcatcacggctgtgcaagagcagcggacagtggcagaccccaggagccacccggtctctgtctaaggcggtctgcaaacctgtgcgctgtccagcccctgtctcctttgagaatggcatttataccccacggctggggtcctatcccgtgggtggcaatgtgagcttcgagtgtgaggatggcttcatattgcggggctcgcctgtgcgtcagtgtcgccccaacggcatgtgggatggagaaacagctgtgtgtgataatggggctggccactgccccaacccaggcatttcactgggcgcagtgcggacaggcttccgctttggtcatggggacaaggtccgctatcgctgctcctcgaatcttgtgctcacggggtcttcggagcgggagtgccagggcaacggggtctggagtggaacggagcccatctgccgccaaccctactcttatgacttccctgaggacgtggcccctgccctgggcacttccttctcccacatgcttggggccaccaatcccacccagaagacaaaggaaagcctgggccgtaaaatccaaatccagcgctctggtcatctgaacctctacctgctcctggactgttcgcagagtgtgtcggaaaatgactttctcatcttcaaggagagcgcctccctcatggtggacaggatcttcagctttgagatcaatgtgagcgttgccattatcacctttgcctcagagcccaaagtcctcatgtctgtcctgaacgacaactcccgggatatgactgaggtgatcagcagcctggaaaatgccaactataaagatcatgaaaatggaactgggactaacacctatgcggccttaaacagtgtctatctcatgatgaacaaccaaatgcgactcctcggcatggaaacgatggcctggcaggaaatccgacatgccatcatccttctgacagatggaaagtccaatatgggtggctctcccaagacagctgttgaccatatcagagagatcctgaacatcaaccagaagaggaatgactatctggacatctatgccatcggggtgggcaagctggatgtggactggagagaactgaatgagctagggtccaagaaggatggtgagaggcatgccttcattctgcaggacacaaaggctctgcaccaggtctttgaacatatgctggatgtctccaagctcacagacaccatctgcggggtggggaacatgtcagcaaacgcctctgaccaggagaggacaccctggcatgtcactattaagcccaagagccaagagacctgccggggggccctcatctccgaccaatgggtcctgacagcagctcattgcttccgcgatggcaacgaccactccctgtggagggtcaatgtgggagaccccaaatcccagtggggcaaagaattccttattgagaaggcggtgatctccccagggtttgatgtctttgccaaaaagaaccagggaatcctggagttctatggtgatgacatagctctgctgaagctggcccagaaagtaaagatgtccacccatgccaggcccatctgccttccctgcacgatggaggccaatctggctctgcggagacctcaaggcagcacctgtagggaccatgagaatgaactgctgaacaaacagagtgttcctgctcattttgtcgccttgaatgggagcaaactgaacattaaccttaagatgggagtggagtggacaagctgtgccgaggttgtctcccaagaaaaaaccatgttccccaacttgacagatgtcagggaggtggtgacagaccagttcctatgcagtgggacccaggaggatgagagtccctgcaagggagaatctgggggagcagttttccttgagcggagattcaggttttttcaggtgggtctggtgagctggggtctttacaacccctgccttggctctgctgacaaaaactcccgcaaaagggcccctcgtagcaaggtcccgccgccacgagactttcacatcaatctcttccgcatgcagccctggctgaggcagcacctgggggatgtcctgaattttttacccctctagccatggccactgagccctctgctgccctgccagaatctgccgcccctccatcttctacctctgaatggccacccttagaccctgtgatccatcctctctcctagctgagtaaatccgggtctctaggatgccagaggcagcgcacacaagctgggaaatcctcagggctcctaccagcaggactgcctcgctgccccacctcccgctccttggcctgtccccagattccttccctggttgacttgactcatgcttgtttcactttcacatggaatttcccagttatgaaattaataaaaatcaatggtttccacaaaaaaaaaagggcggccgccgannantgagcttgtactttattacatatgcaaccttgccatgcctgccagttaactcccctcccgccaatgttatcctcatgatatcagctccctcttggggccactgagctgcccccctttccttctgggctggagtagtggtgcccctcaagcaggcaatgggcagggggagatccacaattaatcgtcgcagttctcttaaaagtattaacacttaaataagcactcttggggagttgcaaaggatattcaggatgggatgcagtgggaggctacccctcatccaaggtacaggctggaatgagctacagctggtctatcgtgggcctcagaaggtgaagagggaccgtattctggggcttagtgtgggtggggcatatcctccccaaacttgttctggtgggcgatgttcttcacatctaggagagcctggtggtggacataggcctgacagtagtaacaccaggctgacaggtcgatgtagctgaggaccagcgggtgtccagaatttccatggtgttggagcatgtggccattgatgtaacgaccacagtagacctgatagcaagagagacacacccaattctcttggattgttccacagtccccacaaggttgggtcacgtctaggcctgctgcaggtatggggcatactgccaccaaatggggacaccagggcagtggtgtcacagcataaaatatggcctgatcagtgaggcccctagatccctgcatcagcatcgaatcagccatgtcctgacctccagctgcctctcctagtaggttctcctctcctggggcctgagattctgaggccccctgagattcgctgcctagctccaaggtcctgagactcccaatcagtgtactgggagatatctggggtgtagttccctgcacaggtgaggttgggggggtctggtggtctgtgctcgaggctagaggagtttggatcagctcggtgccccctggagcctcctctgacgtagtctggtccagtgtggctccctccatggctgcctccgaggtggtctgggccagtgtagctcctcctacagcctcctctgaggtagtctggcccagcgtggctcccccaacagcatcctctgaggtggtctggtccagaatggctcctcccacagtctcctctgaggtggtctggtccggagtggctcccccgacagcctcctctgaggtggtctggcccagcatggctcccccaatggctgcctcagaaatggtctgggccagagtggctccccctgtggctgcctctgagggctggtcctgagtgagggccaccacagctgtctctgagttagtctggcctggagtggactcttccccaaatgatgccgaggtgactttccccatgcctgcttccagaaccttcttttctcgtgtggtcatccgctcagctaacctaggtttggctggttggggtgccttcttggtgaccaacttagaactggagggtccttctctgtcttctaccttcatgacccgtaagctgcgccagtatctgcgatggacttggatggtctcagtgattgaggccagggcccctgatagtgggggccgtggcagggtcagcaggggtggtgggtctccaaggagggagcgagtgcaggcagccatggactctgagatggatgtcaggttatagccaccctctaggataaggataatgcggccactggcaaggcccatcagcaggtgggtgaggtgggcataaccctcaggtgacacctggcagccccccagcggatccccccgtgcagcatcaaagccagctgagaccagcaccagttctgggttaaactcgtaggcaatgggaagcaccaggcgatgccaggcagctaggtagtcagcatcacccatgcggggcccgttccatgccacgttgacggtgaagcctgtgcccgcagcccggccgatctggctgctggcaccctcatcccccatggggaagaaggtgccatgatcatagcggtgcagggacacatatagcacactggggtcatcctcaaacatgtgctgagttccattaccgtggtggacatcccaatccacaatcaggatccgtagggcatgcccactgatagtctgggcatggcgagcagccacagccacagagttgaaaaagcaaaaaccgcaagctgcatcctgctctgcgtggtgtcctgggggacgcaccacagcagcaccattcagaacctctcctgagagcacagcctccaccaggcggcaggcagcgccagtggcaagctgtgcacaggcgaaggtactggggcagatatagatggagtcaaagttggaactctcacggtgcagctcccgggttttcattttctctgtggcccggagatgacccacgtactcagcactgtgacaggtgagcagctcagcctctgtggcagggcgcggtgtcagggtgaggcagcgcccggcaaggcccagctcctccagacggcacatgatccgcaagatgcgctggggtacctcagggtggtggctgtcccacaagttgcagtgattcatcatattttggtcatagaccagccctgtgcgagactgtagcactggccatgtcaggattgggagcacagggggctcccagggtccttcctcctcgctctcctctacattgtcctcctccatgttgtccctctccacggtctcagttgatctcacaagaacctcccagaagggctcaagggcttccagagcacaggaaactgaagcctgggcactccggcagggggcaccaggtgactccagcatggggcaagggtctcccagaagggtgtggagcgaagcactgacgccttcagccagggcgcggaggttgtagccaccctccagagacaggatcagcttgcctcctgccagacccatgagcaggtgggttagctgggcgaaccctgccggagtggcggccatctcacccttggggtccccttgcagggcatcaaatccagcagccaccaggaccagctgaggctggaactcgagggcgactggcagcaggacgtgcaggaaagcagcaatgtagtcagcatcccgcatccccacctggttccaaggcacattgatggtatatccttggccttggccgaaacctgtggtggaccagttagaggccttcaggtggggccagaacctaccctgctcgtagcggtggatggagaaatagaggacactggggtcctggtcgaaggtgaactgtgttccttgaccgtggtgcacatcccaatctacgataaggaccctccggatgcggtgtttctgttgagcatagcgggctgccacagccacgtggttgaacatgcaatagccatccataagactgtgctgggcgtgatgtccaggaggcctaatgatggccatgccattccggatctcagcccccaggaccgcatccaccagcctgaggacagagcctgaggccaggcaggcacaggagtatgagttcggatgcagataaactgagtcgtaggtgtctgctaggacacggagttctccctcattcatgtactgggttgtttccatcagatcaatatattctaggctgtgaaccaacatcagctcttccttttcagcaaaccgggcctgaaaggacacgcagcgatctaggaggccctcctggatcagttgctccttgatggcatggagccgctcagggccttccgggaagctgtcatcccagaggcaatggaattcatttaactgctcatccaacaccaagccagtgccagccagtgcttcagcctcaaggttcagatccatcccttgcagtcccacgattaggtcttcttccattgcttggccgagcttcttcattttgcctttcttctttacctccgctagattggggatagagcggggaacggctccctttttaatatttcgcttcgaagtgacactggagtcctgagggggcgactgggggttctgcctacttcttcgctgcctggttgtggtggaatcctggccggttgaggtcatagttgaggaggcttggcccctgccgcggttcttccactccgccagatcccgcccctagcgtttcaaccagccccgctcctcaggggactgccccgttccttcaaccagctccaccccctgcccagacccg

SEQ ID NO: 273 - DNA, 3458 bp, Homo sapiens
  misc_feature: Incyte ID No: 395096.3
ggttgttgctgtagtggcggagaggatcgtggtactgctatggcggaatcatcggaatccttcaccatggcatccagcccggcccagcgtcggcgaggcaatgatcctctcacctccagccctggccgaagctcccggcgtactgatgccctcacctccagccctggccgtgaccttccaccatttgaggatgagtccgaggggctcctaggcacagaggggcccctggaggaagaagaggatggagaggagctcattggagatggcatggaaagggactaccgcgccatcccagagctggacgcctatgaggccgagggactggctctggatgatgaggacgtagaggagctgacggccagtcagagggaggcagcagagcgggccatgcggcagcgtgaccgggaggctggccggggcctgggccgcatgcgccgtgggctcctgtatgacagcgatgaggaggacgaggagcgccctgcccgcaagcgccgccaggtggagcgggccacggaggacggcgaggaggacgaggagatgattgagagcatcgagaacctggaggatctcaaaggccactctgtgcgcgagtgggtgagcatggcgggcccccggctggagatccaccaccgcttcaagaacttcctgcgcactcacgtcgacagccacggccacaacgtcttcaaggagcgcatcagcgacatgtgcaaagagaaccgtgagagcctggtggtgaactatgaggacttggcagccagggagcacgtgctggcctacttcctgcctgaggcaccggcggagctgctgcagatctttgatgaggctgccctggaggtggtactggccatgtaccccaagtacgaccgcatcaccaaccacatccatgtccgcatctcccacctgcctctggtggaggagctgcgctcgctgaggcgagctgagggcaggcagctgcatctgaaccagctgatccgcaccagtggggtggtgaccagctgcactggcgtcctgccccagctcagcatggtcaagtacaactgcaacaagtgcaatttcgtcctgggtcctttctgccagtcccagaaccaggaggtgaaaccaggctcctgtcctgagtgccagtcggccggcccctttgaggtcaacatggaggagaccatctatcagaactaccagcgtatccgaatccaggagagtccaggcaaagtggcggctggccggctgccccgctccaaggacgccattctcctcgcagatctggtggacagctgcaagccaggagacgagatagagctgactggcatctatcacaacaactatgatggctccctcaacactgccaatggcttccctgtctttgccactgtcatcctagccaaccacgtggccaagaaggacaacaaggttgctgtaggggaactgaccgatgaagatgtgaagatgatcactagcctctccaaggatcagcagatcggagagaagatctttgccagcattgctccttccatctatggtcatgaagacatcaagagaggcctggctctggccctgttcggaggggagcccaaaaacccaggtggcaagcacaaggtacgtggtgatatcaacgtgctcttgtgcggagaccctggcacagcgaagtcgcagtttctcaagtatattgagaaagtgtccagccgagccatcttcaccactggccagggggccgtcggctgtgggcctcacggcgtatgtccagcggcaccctgtcagcagggagtggaccttggaggctggggccctggttctggctgaccgaggagtgtgtctcattgatgaatttgacaagatgaatgaccaggacagaaccagcatccatgaggccatggagcaacagagcatctccatctcgaaggctggcatcgtcacctccctgcaggctcgctgcacggtcattgctgccgccaaccccataggagggcgctacgacccctcgctgactttctctgagaacgtggacctcacagagcccatcatctcacgctttgacatcctgtgtgtggtgagggacaccgtggacccagtccaggacgagatgctggcccgcttcgtggtgggcagccacgtcagacaccaccccagcaacaaggaggaggaggggctggccaatggcagcgctgctgagcccgccatgcccaacacgtatggcgtggagcccctgccccaggaggtcctgaagaagtacatcatctacgccaaggagagggtccacccgaagctcaaccagatggaccaggacaaggtggccaagatgtacagtgacctgaggaaagaatctatggcgacaggcagcatccccattacggtgcggcacatcgagtccatgatccgcatggcggaggcccacgcgcgcatccatctgcgggactatgtgatcgaagacgacgtcaacatggccatccgcgtgatgctggagagcttcatagacacacagaagttcagcgtcatgcgcagcatgcgcaagacttttgcccgctacctttcattccggcgtgacaacaatgagctgttgctcttcatactgaagcagttagtggcagagcaggtgacatatcagcgcaaccgctttggggcccagcaggacactattgaggtccctgagaaggacttggtggataaggctcgtcagatcaacatccacaacctctctgcattttatgacagtgagctcttcaggatgaacaagttcagccacgacctgaaaaggaaaatgatcctgcagcagttctgaggccctatgccatccataaggattccttatggatggcatagggattctggtttggggtggtcagtgccctctgtgctttatggacacaaaaccagagcacttgatgaactcggggtactagggtcagggcttatagcaggatgtctggctgcacctggcatgactgtttgtttctccaagcctgctttgtgcttctcacctttgggtgggatgccttgccagtgtgtcttacttggttgctgaacatcttgccacctccgagtgctttgtctccactcagtaccttggatcagagctgctgagttcaggatgcctgcgtgtggtttaggtgttagccttcttacatggatgtcaggagagctgctgccctcttggcgtgagttgcgtattcaggctgcttttgctgcctttggccagagagctggttgaagatgtttgtaatcgttttcagtctcctgcaggtttctgtgcccctgtggtggaagagggcacgacagtgccagcgcagcgttctgggctcctcagtcgcaggggtgggatgtgagtcatgcggattatccactcgccacagttatcagctgccattgctccctgtctgtttccccactctcttatttgtgcattcggtttggtttctgtagttttaatttttaataaagttgaataaaatataaaaaaaaaaaaaaag

SEQ ID NO: 274 - DNA, 1447 bp, Homo sapiens
  misc_feature: Incyte ID No: 374086.1
  unsure 718-784: a, t, c, g, or other
agagagtgaggaggctgcgtctggctcccgctctcacagccattgcagtacattgagctccatagagacagcgccggggcaagtgagagccggacgggcactgggcgactctgtgcctcgctgaggaaaaataactaaacatgggcaaaggagatcctaagaagccgagaggcaaaatgtcatcatatgcattttttgtgcaaacttgtcgggaggagcataagaagaagcacccagatgcttcagtcaacttctcagagttttctaagaagtgctcagagaggtggaagaccatgtctgctaaagagaaaggaaaatttgaagatatggcaaaagcggacaaggcccgttatgaaagagaaatgaaaacctatatccctcccaaaggggagacaaaaaagaagttcaaggatcccaatgcacccaagaggcctccttcggccttcttcctcttctgctctgagtatcgcccaaaaatcaaaggagaacatcctggcctgtccattggtgatgttgcgaagaaactgggagagatgtggaataacactgctgcagatgacaagcagccttatgaaaagaaggctgcgaagctgaaggaaaaatacgaaaaggatattgctgcatatcgagctaaaggaaagcctgatgcagcaaaaaagggagttgtcaaggctgaaaaaagcaagaaaaagaaggaagaggaggaagatgaggaagnnnnnnnnnnnnnnnnnnnnnnnnnnnnnnnnnnnnnnnnnnnnnnnnnnnnnnnnnnnnnnnnnnnataagttggttctagcgcagtttttttttttctggtctataaagcatttaacccccctgtacacaactcactccttttaaagaaaaaaattgaaatgtaaggctgtgtaagatttgtttttaaactgtacagggtctttttttgtatagttaacacactaccgaatgtgtctttagatagccctgtcctggtggtattttcaatagccactaaccttgcctggtacagtatgggggttgtaaattggcatggaaatttaaagcaggttcttgttggtgcacagcacaaattagttatatatggggatggtagttttttcatcttcagttgtctctgatgcagcttatacgaaataattgttgttctgttaactgaataccactctgtaattgcaaaaaaaaaaaaaagttgcagctgttttgttgacattctgaatgcttctaagtaaatacaatttttaaaaaaccgtatgagggaactgtgtagacaaggtaccaggtcagtcttcttccatgtctattagctccacaaagccaatctcaatccctcaaaacaatcttgtcatacttgaaaatatgacactctagtcaaagccttggtaaaataatcagtgtttccaatctgtcctgttacaaaagaaacagattattattgaacttatgc

SEQ ID NO: 275 - DNA, 1365 bp, Homo sapiens
  misc_feature: Incyte ID No: 444495.4
  unsure 1361: a, t, c, g, or other
agggggtccaaagtgctcagcccccggggcacagcaggacgtttgggggccttctttcagcaggggacagcccgattgggctggggatacccgtttctctagcttggagccaccaagatagaggacaaacacttctgtgattcagtccccagactgtctctgacttaatcccttgggttcaagccctatgtgggagagcaagggcacacactgcctaatccgtggtgtcccccccaggacaatggcgtctcttggccacatcttggttttctgtgtgggtctcctcaccatggccaaggcagaaagtccaaaggaacacgacccgttcacttacgactaccagtccctgcagatcggaggcctcgtcatcgccgggatcctcttcatcctgggcatcctcatcgtgctgagcagaagatgccggtgcaagttcaaccagcagcagaggactggggaacccgatgaagaggagggaactttccgcagctccatccgccgtctgtccacccgcaggcggtagaaacacctggagcgatggaatccggccaggactcccctggcacctgacatctcccacgctccacctgcgcgcccaccgccccctccgccgccccttccccagccctgcccccgcagactccccctgccgccaagacttccaataaaacgtgctgcagcgcgccttcgccgccaaagcatccagcagccccctgctccggcccagcatggcgaccccgacccagacccccacaaagggctcctgaggaacctgacccattttactatgactacaacacggtgcagactgtgggcatgactctggcaaccatcttgttcctgctgggtatcctcatcgtcatcagcaagaaggtgaagtgcaggaaggcggactccaggtctgagagcccaacctgcaaatcctgtaagtctgagcttccctcttcagcccctggtggcggcggcgtgtaacaccttcccgaggaaactccgctgccgaccctgcctgagcgcgggagcctgaggaccgggtggaggcggtggggacccagccgcgcgccgggagcgctccccggaatgagccgccccacccaccccaaggctggagccgctgcaccctgctgtccctctccaggccttggcaatgacgatcccccaaagagcccgtctgcaccccagacccagggcctcaggcctccagctcctgggatccgggagtccatcccggcccagcacccccagcatccccgtgtatggcccccctgcacctccttgtctcatccccgaagatccgtccccctggcccctcagtgtccatgtcttgagcttaataaatgtgcatttggttttttcctctgtaaaanaaaa

SEQ ID NO: 276 - DNA, 795 bp, Homo sapiens
  misc_feature: Incyte ID No: 474876.2
gggtgaaaggtcatagtcctgtttggcggccatttctcttgaaactgcggctcgggacctgcggtacctgctgtagtcacgagggacgggcggcggcctggtcggcagagagtagcctgcaacattcggccgtggttacgatgagtttacccctcaatcccaaacctttcctcaatggactaacaggaaagccagtgatggtgaaacttaagtggggaatggagtacaagggctatctggtatctgtagatggctacatgaacatgcagcttgcaaatacagaagaatacatagatggagctttgtctggacatctgggtgaagttttaataaggtgtaataatgtcctttatatcagaggtgtggaagaagaggaagaagatggggaaatgagagaatagcatcttttgtgggggattttttttatatatatttctagacaataaagatttgtttgtttttcaacttgacttgtgaactatttgtattcagatatttacaagcaaagctgaaatgatgaaccaattgggaaagattactcactgaactaatgctttaaaagccactgaatttcatttaagttgcttttcttttgtaagcccaatattcttttttttcccataaaggataattatttatatgctttagatatttttatgaaggtgaatttcagaccttttcttgtaaaattatctattagctgagaccttttaaatgcaactttttcttttaaagttatttttgagctacttttaacgtataaaattaaacatttttttattaataccaagaaaa

What is claimed is:

1. A composition comprising a plurality of polynucleotides that are differentially expressed in foam cell development and selected from SEQ ID NOs:1-276 or a complement thereof.

2. The composition of claim 1, wherein each of the polynucleotides is differentially expressed early in foam cell development and is selected from
(a) SEQ ID NOs:1-55;
(b) SEQ ID NOs:171-196; or
(c) a complement of (a) or (b).

3. The composition of claim 1, wherein each of the polynucleotides is differentially expressed greater than 3-fold and is selected from
(a) SEQ ID NOs:47-67;
(b) SEQ ID NOs:194-213; or
(c) a complement of (a) or (b).

4. The composition of claim 1, wherein the polynucleotides are immobilized on a substrate.

5. A high throughput method for detecting altered expression of one or more polynucleotides in a sample, the method comprising:
(a) hybridizing the composition of claim 2 with the sample, thereby forming one or more hybridization complexes;
(b) detecting the hybridization complexes; and
(c) comparing the hybridization complexes with those of a standard, wherein each difference in the size and intensity of a hybridization complex indicates altered expression of a polynucleotide in the sample.

6. The method of claim 5, wherein the sample is from a subject with atherosclerosis and comparison with a standard defines early, mid, and late stages of that disease.

7. A high throughput method of screening a library of molecules or compounds to identify a ligand which binds a polynucleotide, the method comprising:
(a) combining the composition of claim 1 with the library under conditions to allow specific binding; and
(b) detecting specific binding between the polynucleotide and a molecule or compound, thereby identifying a ligand that specifically binds to the polynucleotide.

8. The method of claim 7 wherein the library is selected from DNA molecules, RNA molecules, peptide nucleic acids, mimetics, peptides, and proteins.

9. A method of obtaining an extended or full length gene from a library of nucleic acid sequences, the method comprising:
(a) arranging individual sequences on a substrate;
(a) hybridizing a polynucleotide selected from claim 1 with the sequences under conditions which allow specific binding;
(b) detecting hybridization between the polynucleotide and one or more sequences; and
(c) isolating the sequences from the library, thereby obtaining extended or full length gene.

10. A substantially purified polynucleotide selected from SEQ ID NOs:35-48, 68-80, 192, 193, and 214-222.

11. An expression vector containing the polynucleotide of claim 10.

12. A host cell containing the expression vector of claim 11.

13. A method for producing a protein, the method comprising the steps of:
(a) culturing the host cell of claim 12 under conditions for the expression of protein; and
(b) recovering the protein from the host cell culture.

14. A protein produced by the method of claim 13.

15. A high-throughput method for screening a library of molecules or compounds to identify at least one ligand which specifically binds a protein, the method comprising:
(a) combining the protein or a portion thereof of claim 14 with the library under conditions to allow specific binding; and
(b) detecting specific binding between the protein and a molecule or compound, thereby identifying a ligand which specifically binds the protein.

16. The method of claim 15 wherein the library is selected from DNA molecules, RNA molecules, PNAs, mimetics, peptides, proteins, agonists, antagonists, antibodies or their fragments, immunoglobulins, inhibitors, drug compounds, and pharmaceutical agents.

17. A method of purifying a ligand from a sample, the method comprising:
a) combining the protein of claim 15 with a sample under conditions to allow specific binding;
b) recovering the bound protein; and
c) separating the protein from the ligand, thereby obtaining purified ligand.

18. A pharmaceutical composition comprising the protein of claim 14 in conjunction with a pharmaceutical carrier.

19. A purified antibody that specifically binds to the protein of claim 14.
